United States Patent Application Publication US 2026/0357256 A1 - sequence listing, part 13

SEQ ID NO: 9 - DNA, 58617616 bp, Homo sapiens (residues 26,052,277-28,223,299 of 58,617,616)
  source 1..58617616: mol_type = genomic DNA
atattcagacctctttgaagccttcgttggaaacgggatttcttcatgttatgctagacagaagaattcccagtaacttccttgtgttgtgtgtgttcaactcacagagttgaactctcatttacacagagcagatttgaaacactctttttgtggaatttgcaagtggagatttcaagtgctttgaggccaaaggcagaaaaggaaatatcttcgtataaaaactagacagaatcattctcagaaactgctatgcgatgtgtgcgttcaactctcagagtttaacttttcttttcattcagcagtttggaaacactctgtttgtaaagtctgcacgtggataacttgacctacttagaggccttcgttggaaacgggtttttttcatgtaaggctagacagaagaattcccagtaacttccttgtgttgtgtgcattcaactcacagagttgaacgttcccttagacagagcagatttgaaacactctatttgtccaatttgcaagtgtagatttcaagcgctttaaggtcaacggcagaaaaggaaatatcttcgtttcaaaactagacagattcattcccacaaactgcgttgtgatgtgttcgttcaactcacagagtttaacctttctgttcatagagcagttaggaaacactctgtttgtaaagtctgccagtggatattcagacctccttgaggccttcgttggaaacgggatttcttcatattctgctagacagaagaattctcagaatcttccttgtgttgtgtgtattcaactcacagagttgaacgatggtttacacagagcagatttgaaacactctttttgtggaatttgcaagtggagatttcagccgctttgaggtcaatggtagaaaagtaaatatcttcatataaaaactagacagaatgattctcagaaacttctttgtgatgtgtgcgttcaactcacagagtttaacctttcttttcatagagcagttaggaaacactctgtttgtaaagtctgcaagtggatattcagacctgtttgaggccttcgttggaaacgggatttctccatactatgctagacagaagaattctcagtaacttccttgtgttgtgtgtattcaactgacagagttgaactatcatttagagagagcagatttgaaacactgttttgtggaatttgcaagtggagatttcaagcgctttggggccaaaggcagaaaaggaaatatcttcgtataaaaactagacagaatcattctcagaaactgctctgcgatgtgtgcgttcaactctcagagtttaacttttcttttcattcaacagtttggaaacactctgtttgtaaagtctgcacgtggataacttgaccacttagaggccttcgttggaaacgggtttttttcatgtaaggctagacagaagaattctcagtaacttcattgtgttgtgtgtattcaactcacagagttcaacgatcctttacacagagcagacttgaaacactctttttctggaatttgcaagtggagatttcagccgctttgaggtcaatggtagaaaaggaaatatcttcctataaaaactagacagaatgattctcagaaactcctttgtgatgtgtgcgttcaactcacagagtttaacctttctttttatagagcagttaggaaacactctgtttgtaaagtctgcaagtggatattcagacctccttgaggccttcgttggaaacgggatttcttcatattatgctagacagaagaattctcagtaagttccttgtagtgtgtgtattcaactcacagagttaaacgatcctttacacagagcatacttgaaacactctttttgtggaatttgcaagtggagatttcagccgctttgaggtcaatggtagaataggaagtatctccctatagaaactagacagaatgattctcagaaactcctttgtgatgtgtgcgttcaactcacagagtttaacctttcttttcatagagcagttaggaaacactctgtttttatagtctgcaagtggatattcagacatctttgaggccttcgttggaaaccgtgatttcttcatattctgctatacagaagaattctcagaaatttccttctgttgtgtgttttcaactcacacagttgaacgatgctttacacagagtagacttgaaacactctttttgtggaatttgcaagtggagatttcagccgctttgaggtcaatggtagaaaaggaaatgtcttcgtataaaaactagacagaatcattctcagaaactgctctgcgatgtgtgcgttcaactctcagagtttaacttttcttttcattcagcagtttggaaacactctatttgtaaagtctgcacgtggataatttgaccacttagaggccttcgttggaaacgggtttttttcatgtaaggctagacagaagaattcccactaacttccttgtgttgtgtacattcaactcacagagttgaacgttcccttagacagagcagatttgaaacactctttttgtgcaattggcaagtggagatttcaagcgctttaaggtcaatggcagaaaaggaaatatcttcgtttcaaaactagacagaatcattcccacaaactgcgttgtgatgtgttcgttcaactcacagagtttaacctttcttttcatagagcagttaggaaacagtctgtttgtcaattctgtaagtggatattctgacatcttgtggcattcgttggaaacgggatttcttcatattctgctagacagaagaattctcagtaacttccttgtgttgtgtgtgttcaactcacagagttgaacgatcctttacagagagcagacttgaaacactctttttgtggaatttgcaagtggagttttcagccgctttgaggtcaatggtagaaaaggaaatatcttcgtataaagactagacagaatgattctcagaaactcctttgtgatgtgtgcgttcaactcacagtgtttaacctttcttttcatagagcagttaggaaacactctgtttgtaaagtctgcaagtggatattcagacctctttgaggccttcgttggaaacgggtttttttcatataaggctagacagaagaattctcagtaacttccttgtgttgtgtgtattcaactgacagagttgaactatcatttagagagagcagatttgaaacactgtttttgtggaagttgcaagtggagatttcaagcgctttggggccaaaggcagaaaaggaaatatcttcgtataaaaattagacagaatcattctcagaaactgctgcgtgatgtgtgcgttcaactctcagattttaacttttcttttcattcagcggtttggaaacactctgtttgtaaagtctgcacgtggaaattttgaccacttagaggccttcgttggaaacgggtttttttcatgtaaggctagacagaagaattcccagtaacttcccttgtgttgtgtgcattcaactcacagagttgaacgttcccttagacagagcagatttgaaacactctatttgtgcaatttgcaagtgtagatttcaagcgctttaaggtcaacggcagaaaaggaaatatcttcgtttcaaaactagacagaatcattcccacaaactgcgttgtgaggtgttcggtaaactcacagagtttaacctttcttttcatagagcagttaggaaacagtctgtttgtaaattctgtaagtggatattctgacatcttgtggccttcgttggaaacggggtttcttcatattctgctagacagaagaattctcagtaacttccttgtgttgtgtgtattcaactcacagagttgaacgatcctttacacagagcagacttgaaacactctttttgtggattttgcaagtggagatttcagccgctttgagttcaatggtagaataggaaatatcttcctatagaaactagacagaatgattctcagaaactcctttgtgatgtgtgcgttcaactcacagagtttaacctttcttttcatagagcagttaggaaacactctgtttgtaaagtctgcaagtggatattcagacctctttgtggccttcgttggaaacgggatttcttcatattatgctagacagaagaattctcagtaacttccttgtgttgtgtgtattcaactcacagagttgaacgatcctttacacagagcagacttgaaacactctttttgtggaatttgcaagtggagatttctgccgctttgaggtcaacggtagaaaaggaaatatcttcgtataaaaactagacagaatcattctcagaaactgctctgcgatgtgtgccttcaactctcagagtttaacttttcttttcattcagcagtttggaaacactctgtttgtaaagtctgcacgtggatattttgaccacttagaggccttcgttggaaacgggtttttttcctgtaaggctaaacagaagaattcccagtaacttccttgtgttgtgtacattcaactcacagagttgaacgttcccttagacagagcagatttgaaacactctttttgtgcaattggcaagtggagattacaagcgctttaaggtcaatggcagaaaaggaaatatcttcgtttcaaaactagacagagtgattctcagaaactcctttgtgatgtctgcgttcaactcacagagtttaacctttcttttcatagagcagttaggaaacactctgtttgtaaagtctgcaagtgcatattcagacctcctttaggccttcgttggaaacgggatttcttcatattctgctatacagaagaattctcagaaacttccttgtgttttgtgtattcaactcacagagttgaacgatcctttaaacagagcagacttgaaacactctttttgtggaatttgcaagtggagatttcagccgctttgaggtcaatggtagaaaaggaaatatcttcgtataaaaactagacagaatgattctcagaaaatcttttgtgatgtgtgcgttcaactcacagagtttaacttttcttctcatagagcagttaggaaacactctgtttgtaaagtctgcaagtggatattcagacctctttgaggccttcgttggaaacgggatttcgtcatattatgctagacagaagaattgtcagtaacttccttgtgttgtgtgtattcaactcacagagttgaacgatcctttacacagagcagacttgaaacactctttttgtggaatttgcatgtggagatttcagccgctttgaggtcaatggtagaataggaaatatcttcctatagaaactatacagaatcattctcagaaactgctgcgtgatgtgtgcgttcaactctcagagtttaacttttcttttcattcagcggtttggaaacactctgtttgtaatgtctgcacgtggatattttgaccacttagaggccttcgttggaaacgggtttttttcatgtaaggctagacagaagaattcccagtaactttccttgtgttgtgtgcattcaactcacagagttgaacgttcccttagacagagcagatttgaaacactctatttgtgcaatttgcaagtatagatttcaagcgctttaaggtcaacggcagaaaaggaaatatcttcgtttcaaaactagacagaatgattctcagaaactcctttgtgatgtgtgcgttcaactcacagagtttaacctttcttttcatagagcagttaggaaacactctgtttgtaaagtctgcaagtggatattcagacctctttgaggctttcgttggaaacgggatttctttatattctgctagacagaagaattctcagtaacttccttgtgttgtgtgtattcaactcacagagttgaacgatcctttacacagagcagacttgaaacactctttttgtggaatttgcaagtggagatttcagcggctttgaggtcaatagtagaaaaggaaatatcttcgtagaaaaactagtcagaatgattctcagaaactcctttgtgatgtgtgcgttcaactcacagagtttaacctttcttttcatagagaagttaggaaacactgtgtttgtaaagtctgcaagtggatattcagacctccttgaggccttcgttggaaacgggatttcttcatattatgctagacagaagaattcccagtaacttccttgagttgtgtgtattcaactcacagagttgaactttcatttacacagagcagatttgaaacactctttttgtggaatttgcaaatggagatttcaagccctttcaggccaaaggcagaaaaggaaatatcttcgtatgaaaactagacagagaatcattctcagtaaactgctgcgtgatgtgtgcgttcaactctcagagtttaacttttcttttcattcagcggtttggaaacactctgtttgtaaagtctgcacgtggatattttgaccacttagaggccttcgttggaaacgggtttttttcatgtaaggctagacagaagaattcccagtaacttccttgtgttgtgtgcattcaaatcacagagttgaacgttcccttagacagagcagatttgaaacactctatttgtgcaatttgcaagtgtagatctcaagcgctttaaggtcaatgggagaaaaggaaatatcttcgtttcaaaactagacagaatcattcccacaaactgcgttgtgatgtgttcgttcaactcacagagtttaacctttcttttcatagagcagttaggaaacagtctgtttgtcaattctgtaagtggatattctgacatcttgtggccttcgttggaaacaggatttcttcatattctgctagacagaagaattctcagtaacttccttgtgttgtgtttattcaactcacagagttgaatgatcctttacacagattagacttgaaacactctttttgtggaatttgcaagtggagatttctgcctctttgaggttaatggtagaaaatgaaatatcttcgtatagaaactagacagaatgattctcataaactcctttgtgatgtgtgcgttcaactcacagagtttaacctttcttttcatagagctgttaggaaacacactgtttgtaaagtctgcaagcagatattcagacctccttgaggccttcgttggaaacgggatttcttcatattctgctagacagaagaattctcagtaacttccttgtgttgtgtgtatacaactcacagagttgaactttcatttagagagagcagatttgaaacactgtttttgtggaatttgcaagtggagatttcaagcgctttggggccaaaggcagaaaaggaaatatcttcgtataaaaactagacagaaacattgtcagaaactgctgcgtgatgtgtgcgttcaactctcagagtttaacttttcttttcattcagcggtttggaaacactctgtttgtaaagtctgcacgtggatattttgaccacttagaggccttcgttggaaacgggatttattcatgtaaggctagacagaagaattcccagtaacttccttgtgttgtgtgcattcaactcacagagttgaacgttcccttagacagagcagatttgaaacagtctattggtgcaatttgcaagtgtagatttcaagcgctttaaggtcaatggcagaaaaggaaatatcttcgtttcaaaactagagagaatcattcccacaaactgcgttgtgatgtgttcgttcaactcacagagtttaacctttctgttcatagagcagttaggaaacactctgtttgtaaagtctgcaagtggatattcagacctctttgaggccttcgttggaaacgggatttcttcatattatgctacacagaaaaattctcagtaacttccttgtgttgtctgtattcaactcacagagttgaacgatcctttacacagagcatacttgaaacactctttttgaggaatctgcaagtggagatttcagccgctaaggggtcaatggtagaataggaaatatcttcctatagaaactagacagaatgattctcagaaacttcattgtgatgtgtgcgttcaactcacagagtttaacctttcttttcatacagcagttaggaaacactctgtttgtaaactctgcaagtcgatattctcacctctttgaggccttcgttggaaacgggatttcttcatactgtgctagacagaagaattctcagtaacttccttgttttgtgtgtattcaactgacagagttgaaatttcatttagagagagcagatttgtaacactgtttttgtggaatttgcaagtggagatttcaagcgcttttgggccaaaggcagaaaaggaaatatcttcgtataaaaactagacagaatcattctcagaaagtgctctgtgatgtgtgcgttcaactctcagagtttaacttttcttttcattcagcagtttggaaacactctgtttgtaaagtctgcacgtggatattttgaccacttagaggccttcgttggaaacgggtttttttcatgtaagggtagacagaagaattcccagtaacttccttgtgttgtgtacattcaactcacacagttgaacgttcccttagacagagcagatttgaaacactctttttgtgcaattggcaaatggagatttcaagcgctttaaggtcaatggcagaaaaggaaatatcttcgtttcaaaactagacagaatcattcccacaaactgcgttgtgatgtgttcgttcaactcacagagtttaacctttctgttcatagagcagttaggaaacactctgtttgtaaagtctgtaagtggatattctgacatccttgtggccttcgttggatacgggatttcttcatattctgctagacagaagaattctcagtaacttccttgtgttgtgtgtattcaactcacagagttgaacgatcctttacacagagcggacttgaaacactctttttgtggaatgtgcaagtggagatttcagccgctttgaggtcaatggtagaaaaggaaatatcttcttatacagactagacagaatgattctcagaaactcctttgtgatgtgtgcgttcaactcacagagtttaacccttcttttcatagagcagttaggaaacactctgtttgtaaagtctgcaagtggatattcagacctctttgaagcgttcgttggaaacgggttttttcatataaggctagacagaagaattctcagtaacttccttgtgttgtgtgtattcaactcacagagttgaatgatcctttacacagaacagtcttgaaaccctctttttgtggaatttgcaagtggagatttcagccgctttgaggtcaatggtagaataggaaatatcttcctatagaaactagacagaatgattctgagaaactcctttgtgatgtgtgcgttcaactcacagagttcaaccattcttttcatagagcagttgggaaacactctgtttgtaaagtctgcaagtggatattcagacttctttgaggccttcgttggaagcgggatttcttcatattctgctagacagaagaattcccagtaacttccttttgttgtgtgtgttcaactcacagagttgaactttcatttacacagagcagattggaaacactctttttgtggaatttgccagtggagatttcaagcgctttgaggccaaaggcagaaaaggaaatatcttcgtataaaaactagacagaatcattctcagaaactgctctgcgatgtgtgcgctcaactctcagagtttaacttttcttttcattcagcagtttggaaacactctgtttgtaaagtctgcacgtggataaattgactacttagaggccttcgttggaaacgggtttttttcatgtaaggctagacagaagaattcccagtaacttccttgtgttgtgtacattcaactcacagagttgaacgttccgttagacagagcagatttgaaacactctttttgtgcaattggcaaatggagatttcaagcgctttaaggtcaatggcagaaaaggaaatatcttcgtttcaaaactagacagaatcattcccagaaactgcgttgtgatgtgttcgttcaactcacagagtttaacctttctgttcatagagcacttaggaaacactctgtttgtaaagtctgtaagtggatattctgacatcttgtggccttcgttggaaacgggattttttcatattctgctagacagaagaattctcagaatcttcccttgtgttgtgtgtattcaactcacagagttgaacgatcctttacacagagcagacttgaaacactctttttgtggaatttgcatgtggagatttcagccgctttgaggtccatggtagaaaaggaaatatcttcgtataaaaactagacagaatgattctcagaaactcctttgtgatgtgtacgttcaactcacagagtttaacctttcttttcttagagcagttaggaaacactctgtttgtaaagtctgcaagtggatattcagacctctttgaggccttcgttggaaacgggtttttttcatataaggctagacagaagaattctcagcaacttccttgtgttgtgtgtattcaactgacagagttgaactttcatttagagagagcagatttgaaacactgtttttgtggaatttgcaagtggagatttcaagcgcttgggggccaaaggcagaaaaggaaatatcttcgtataaaaactagacagaatcattctcagaaactgctgcgtgatgtgtgcgttcaactctcagagtttaacttttcttttcattcagcggtttggaaacactctgtttctaaagtctgcacgtggatattttgaccacttagaggccttcgttggaaacgggtttttttcatgtaaggctagacagaagaattcccagtaacttccttgagttgtgtgcattcaactcacagagatgaacattcccttagacagagcagatttgaatcactctatttgtgtaatttacaagtgtagatttcaagcgctttaaggtcaatggcagaaaaggaaacatcttcgtttcaaaactagacagaatcattcccacaaactgcgttgtgaggtgttcgttcaactcacagagtttaacctttcttttcatagagcagttaggaaacagtctgtttgtaaattctgtaagtggatattctgacatcttgtggccttcgttggaaacgggatttcttcatattctgctagacagaagaattctcagtaacttccttgtgttgtgtgttttcaactcacaagagttgaacgatcctttacacagagcagacttgaaacactccttttgtggaatttgcaagtggagatttcagccgctttgaggtcaatggtagaataggaaatatcttcctatagaaactagacagaatcattctcagaaactcctttgtgatgtgtgtgttcaactcacagagtttaacctttcttttcatagagcagttagtaaacactctgtttataaagtctgcaagtggatattcagacccctttgaggccttcgttggaaacgggatttcttcatattattctagacagaagaattctcagtaacttccttgtgttgtgtgtattcaactgacagagttgaactttcatttagagagagcagatttgaaacacagtttttgtggaatttgcaagtggagatttcaagcgctatggggccaaaggcagaaaaggaaatatattcgtataaaaactagacagaatcattctcagaaactgctctgtgatgtgtgcgttcaactctcagagtttcacttttcttttcattcagcattttggaaatactctgtttgtaaagtctgcacgtggatattttgaccacttagaggccttcgttggaaacgggtttttttcatgtaaggctagacagaagaattcccagtaacttccttgtgttgtgtgcattccactcacagagttgaacgttcccttagacagagcagatttgaaacactctatttgtgcaatttgcaagtgtagatttcaagcgctttaaggtcaatggcagaaaaggaaatatcttcgtttcaaaactagacagaatcattcccacaaactgcgttgtgatgtgttcgttcaactcacagagtttaacctttctgttcatagagcagttaggaaacactctgtttgtaaagtctgtaagtggatattctgacatccttgtggccttcgtttgaaaagggatttcttcatattctgctagacagaagaattctcagaaacttccttgtgttgtgtgatttcaactcacagagttgaacgatcctttacacagagcagacttgaaacactctttttgtggaatttgcaagtggagatttcagccgctttgaggtcaatggtagaataggaaatatcttcctatagaaactagacagaatgattctcagaaactcctttgtgatgtgtacgttcaactcacagagtttaacctttcttttcatagagcagttaggaaacactctgtttgtaaagtctgcaagtggatattcagacctctttgaggccttcgttggaaacgggtttttttcatataaggctagacagaagaattctcagtaacttccttgtgttgtgtgtattcaactgacagagttgaactttcatttagagagagcagatttgaaacactgtttttgtggaatttgcaagtggagatttcaagcgctttgtggccaaaggtagaaaaggaaatatcttcgtataaaaactagacagaatcattctcagaaactgctgcgtaatgtgtgcgttcaactctcagagtttaacttttcttttcattcagcggtttggaaacactctgtttctaaagtctgcacgtggaaattttgaccatttagaggccttcgttggaaacgggtttttttcatgtaaggctagacagaagaattcccagtaacttccttgtgttgtgtgcattcaactcacagagttgaacgttcccttagacagaccagatttgaaacactctatttgtgcaatttgcaagtgtagatttcaagcgctttaaggtcaatggcagaaaaggaaatatcgtcgtttcaaaactagacagaatcattcccacaaactgcgttgtgatgtgttcgttcaactcacagagtttaacctttctgttcatagagcagttaggaaacactttctttgtaaagtctgtaagtggatattctgatatcttgtggccttcgttggaaacgggatttcttcatattctgctagacagaagaattctcagtaacttccttgtgttgtgtgtattcaactcacagagttgaacgatcctttacacagagcagacatgaaacactctttttgtggaatttgcaagtggagatttcagccgctttgaggtcaatggtagaaaaggaaatatcttcgtataaaaactagacagaatgattctcagaaactcctttgtgatgtgtgcgttcaactcacagagttcaacctttcttttcatagagcagttgggaaacactctgtttgtaaagtctgcaagtggatattcagacttctttgaggccttccttggaagcgggatttcttcatattcagctagacagaagaattctcagtaacttccttgtgttgtgtgtattcaactcacagagttgaacgatgctttacacagagcagacttgaaacactctttttgtggtatttgcaagtggagatttcagccgctttgaggtcaatgttagaaaaggaaatatcttcgtataaaaactagacagaatcattctcagaaactgctctgcgatgtgtgtgttcaactctcagagtttaacttttcttttcattcagcagtttggaagcactctgtttgtgaagtctgcacgtggatattttgaacacttagaggccgtctttggaaacgggtttttttcctgtaaggctagacagaagaattcccagtaacttccttgtgttgtgtgcattcaactcacagagttgaacgttccttagacagagcagatttgaaacactctattcgtgcaatttgcaagtgtagatttcaagcgctttaaggtcaatggcagaaaaggaaatatcttcgtttcaaaactagacagaatcattcccacaaactgcgctgtgatgtgttcgttcaactcacagagtttaacctttctgttcatagagcagttaggaaacactctgtttgtaaagtctgtaagtggatattctgacattttgtggccttcattggaaatgggatttcttcatattctcctagacagaagaattctcagtaacttccttgtgttgtgtgtattcaactcacagagttgaacgatcctttacacagagcagacttgtaacactctttttgtgtaatttgcaagtggagatttcagccgctttgaagtcaaaggtagaaaaggaaatatcttcctataaaaactagacagaatgattctcagaaactcctttgtgatgtgtgcgttcaactcacagagtttaacctttcttttcatagagcagttaggaaacactctgtttgtaaagtctgcaagtggatattcagacgtctttgaggccttcgttggaaacgggtttttttcatataaggctagacagaagaactcccagtaacttccttgtgttgtgtgtgttcaactcacagagttgaactttcctttacacagagcagatttgaaacactctttttgtggaatttgcaaatggagatttcagccgcgttgaggtcaatggtagaaaaggaaatatcttcgtttcaaaactagacagaatcattctcagaaactgctctgcgatgtgtgctttcaactctcagagtttaacttttcttttcattcagcagtttggaaacactctgtttgtaaagtctgcacgtggatattttgaccacttagaggccttcgttggaaacgggtttttttcctgtaaggctagacagaagaattcccagtaacttccttgtgttgtgtacattcaactcacagagttcaacgttcccttagacagagcagatttgaaacactctttttgtgcaattggcaagtggtgatttcagccgctttgaggtcaatggtagaaaaggaaatatcttcgtataaaaactagacagaatcattcccacaaactgcgttgtgatgtgttcgttcaactcacagagtttaacctttcttttcatagagcagttaggaaacagtctgtttgtaaattttgtaagtggatattctgacatcttgtgcccttcgttggaaacgggatttcttcatattctgctagacagaagaattctcagaatcttccttgtgttgtgtgtattcaactcacacagttgaacgatactttacacagagcagacttgaaacgctctttttgtggaatttgcaagtggagatttcagccgcgttgaggtcaatggtagaaaaggaaatatcttcgtataaaaactagacagaatgattctcagaaactcctttgtgatgtgtgcgttcaactcacacagtttaacctttcttttcatagagcagttaggaaacactctgtttgtaaagtctgcaggtggatattcagacctccttgaggcattcgttggaaacgggatttcttcatattatgctagacagaagaattcccagtaacttccttgtgttgtgtgtgttcaactcacagagttaaactttcatttacccagagcagatttgaaacactctttttgtggaatttgcaagtggagatttcaagcgctttgaggccaaaggcagaaaaggaaatatcttcgtttcaaaactagacagaatcattctcagaaactgctgcgtgatgtgtgcgttcaactctcagagtttaacttttcttttcattcagcggtttggaaacattctgtttgtaaagtctgcacgtggatattttgaccacttagaggccttctttggaaacgggtttttttcatgtaaggctagacagaagaattcccagtaacttccatgtgttgtgtgcattcaactcacagaattgaacgttcccttagacagagcagatttgaaacactctatttctgcaatttgcaagtgtagatttcaagcgctttaaggtcaatggcagaaaaggaaatatcttcgtttcaaaactagacagaatcattcccacaaactgcgttgtgatgtgttcgttcaactcacagggtttaacctttcttttcatagagcagttaggaaacagtctgtttgtcatttctgtaagtggatattctgacatcttgtggccttagttggaaacgggatttcttcatattctgctagacagaataattctcagtaacttccttgtgttgtgtgtattcaactcacagagttgaaggatcctttacagagagcaggcttgaaacactgtttttgtcgaatttgcaagtggagatttcagccgctttgaggtcaatggtagaataggaaatatcttcttatagaaactagacagaatgattctgagaaagtcctttgtgatgtgtgcgttcaactcacagagtttaaccttttttttcatagagcagttaggaaacactctgtttgtaaagtctgcaagtggatattcagacctctttgaggccttcgttggaaatgggatttcttcatattatgctagacagaagaattcccagtaacttccttgtgttgtgtgtgttcaactcacagagttgaactttcatttacacagagcagatttgaaactctctttttgtggaatttgcaagtggagatttcaagcgctttgaggccaaaggcagaaaaggaaatatcttcgtttcaaaactagacagaatcattatcagaaactgctgcgtgatgtgtgcgttcaactctcagagtttaacttttcttttcattcagcggtttggaaacactctgtttgtaaagtctgcacgtggatattttgaccacttagaggccttcgttggaaacgggtttttttcatgtaacgctagacagaagaattcccaggaacttccttgtgttgtgtacattcaactcacagagttgaacgttcccttagacagagcagatttgaaacactctttttgtgcaattggcaagtggtgatttcagccgctttgaggtcaatggtagaaaaggaaatatcttcgtataaaaactagacagaatgattctcagaaactcctttgagatgtgtgcgttcaactcatagagtttaacttttcttttcatagagcagttaggaaacactctgtttgtaaagtctgcaggtggatattcagacctctttgaggccttcgttggaaacgggatttcttcatattctgctagacagaagaattctcaataacttccttgtgttgtgtgtattcaactcacagagttgaacgatcctttacacagagcagacttgaaacactctttttgtggaatttgcaagtggagatttcagccgctatgaggtcaatagtagaaaaggaaatatcttcgtagaaaaactagacagaatgattctcagaaactcctttgtgatgtgtgcgttcaactcacagagtttaacctttcttttcatagagcagttaggaaacactctgtttgtaaagtctgcaagtggatattcagacatcctagaggctttcgttggaaacgggatttcttcatattctgctatacagaagaattcccagtaacttccttgtgttgtgtgtgttcaactcacagagttgaactttcatttacccagagcagatttgaaacactctttttgtggaatttgcaagtggagatttcaagcgctttgaggccaaatgcagaaaaggaaatatcttcgtttcaaaactagacagaatccttctcagaaactgctgcgtgatgtgtgcgttcaactctcagagtttaacttttcttttcattcagcggtttggaaacactctgtttgtaatgtctgcacgtggataatttgaccacttagaggccttcgttggaaacgggttttttgcacgtaaggctaggcagaagaattcccagtaacttcccttgtgttgggtgcattaaactcacagagttgaacgttcccttagacagagcagatttgaaacactctatttgtgcaatttgcaagtgtagatttcaagcgctttaaggtcaatggcagaaaaggaaatatcttcgtttcaaaactagacagaacgtttctcagaaactcctttgtgatgtgtgcgttcaactcacagagtttaacctttcttttcatagagcagttaggaaacactctgtttgtaaagtctgcaagtggatattcagacctccttgaggccttcgttggaaacgggatttcttcatattctgctagacagaagaattctcagtaacttccttgtgttgtgtttattcaactcacagagttgaatgatcctttacacagagcagacttgaaacactctttttattgaatttgcaagtggagatttcagccgctttgaggtcaatggtagaaaagtaaatatcttcgtataaagactagacagaatgattctcagaaactcctttgtgatgtgtgcgttcaactcacagagtttaacgtttcttttcatagagcagttaggaaacactctgtttgtaaagtctgcaagtggatattcagacatctttgaggccttcgttggaaacgggatttcttcatgttctgctagacagaagaattcccagtaacttccttgtgttgtgtgtgttcaactcacagagttgaactttcatttacacagagcagatttgaaacactctttttgtggaatttgcaagaggagatttcaagcgctttgaggccaaagacagaaaaggaaatatcttcgtataaaaactagacagaatcattctcagaaactgctgcgtgatgtgtgcgttcaactctcagagtttaacttttcttttcattcagcggtttggaaacactctgtttgtaaagtctgcacgtggatattttgaccacttagaggccttcgttcgaaacgggattttttcatgtaaggctagacagaagaattcccagtaacttccttgtgttgtgtacattcaactcacagagttgaacgttcccttagacagagcagatttgaaacactctttttgtgcaattggcaagtggagatttcaagcgctttaagttcaatggcagaaaaggaaatatcttcgtttcaaaactagacagaatcattcccacaaactgcgttgtgaggtgttcgttcaactcacagagtttaacctttcttttcatagagcagttaggaaacagtctgtttgtaaattctgtaagtggatattctgacatcttgtggccttcgttggaaacgggatttcttcatattctgctagacagaagaattctcagtaacttccttctgttgtgtttattcaactcacagagttgaatgatcctttacacagagcagacttgaaacactctttttgtggaatttgcaagtggaggtttcagccgctttgaggtcaatggtagaaaagtaaatatcttcgtataaagactagacagaatgattctcagaaactcctttgtgatgtgtgcgttcaactcacagagttcaacctttcttttcatagagcagttgggaaacactctgtttgtaatgtctgcaagtggatattcagacttctttgaggctttcgttggaagcgggatttcttcatattctgctagacagaagaattctcagtaacttccttgtgttgtgtgtattcaactcacagagttgaacgatcctttacacagagcagacttgaaacactctttttgtggaatttgcaagtggagatttcaagcgctttggggccaaaggcagaaaaggaaatatcttcgtataaaaactagacagaatcattctcagaaactgctgtgtgatgtgtgcgttcaactctcagagtttaacttttcttttcattcagcggtttggaaacactctgtttgtaaagtctgcacgtggatattttgaccacttagaggccttcgttggaaacgggtttttttcatgtaaggctagacagaagaattcccagtaacttccttgtgttgtgtgcattcaactcacagagatgaacgttcccttagacagagcagatttgaaacactctatttgtgcaatttgcaagtgtagttttcaagctctttaaggtcaacggcagaaaaggaaatatcttggtttcaaaactagacagaatcattgtcacaaactgcgttgtgatgtgttcgttcaactcacagagtttaacctttcttttcatagagcagttaggaaacactctgtttgtaaagtctgcaagtggatattcagacatctttgaggctttctttggaaacgggatttcttcatattcttctagacagaagaattctcagtaactttccttgtgttgtgtgcattcaactcacagagttgaacgatcctttacacagagcagacttgagacactctttttgtggaatttgcaagtggagatttcagccgctttgaggtcaatggtagaaaaggaaatatcttcgtataaaaactagacagaatgattctcataaactcctttgtgatgtgtgcgttcaactcacagagtttaacttttcttttcatagagcagttaggaaacactctgtttgtaaagtctgcaagtggatattcagacctccttgaggccattcgttggaaacgggatttcttcatattctgctagacagaagaattcccagtaacttccttgtgttgtgtgtgttcaactcacagagttgaactttcatttacacagagcagatttgaaacactctttttgtggaatttgcaagtagagatttcaagcgctttgaggccaaaggcagaaaaggaaatgtattcgtataaaaactagacagaatcattctcagaaactgctctgcgatgtgtgcgttcaactctcagagtttaacttttcttttcattcagcagtttggaaacactctgtttgtaaagtctgcaagtggatattcagacctctttgaggccttcgttggaaacgggttttttacatataaggctaaacagaagaattcccagtaacttccttgtgttgtgtgcattcaactcacagagttgaacgttcccttagacagagcagatttgaaacactctatttgtgcaatttgcaagtgtagatttcaagcgctttaaggtcaatgggagaaaaggaaatatcttcgtttcaaaactagacagaatcattcccacaaactgcgttgtgatgtgttcgttcaacttacagagtttaacatttctgttcatagagcagttaggaaacactctgtttgtaaagtctgtaagtggatattcagacatcttgtggccttcgttggaaacgggatttcttcctattctgctagacagaagaattctcagtaacttccttgtgttgtgtgtactcaactcacagagttgaaggatcctttacagagagcaggcttgaaacactctttttgtcgaatttgcaagtggagatttcagccgctttgaggtcaatggtagaataggaaatatcttcttatagaaactagacagaatgattatcagaaaatcctttgtgatgtgtgcgttcaactcacagagtttaacttttcttttcatagagcagttaggaaacactctgtttgtaaagtctgcaagtggatattcagacctctttgaggccttcgttggaaacgggatttcttcatattatgctagacagaagaattctcagtaacttccttgtgttgtgtgtattcaactgacagagttgaactttcatttagagagagcagatttgaaacactgtttttgtggaatttgcaagtggagatttcaagcgctttggggccaaaggcagaaaaggaaatatcttggtataaaaactagacagaatcattctcagaaaatgctctgcgatgtgtgcgttcaactctcagagtttaacttttcttttcattcagcagtttggaaacactctgtttgtaaagtctgcacgtggataatttgatcacttagaggccttcgttggaaacggctttttttcatgtaaggctagacagaagaattcccagtaacttccttgtgttgtgtgcattcaactcacagagttgaacgttcccttagacagagcagatttgaaacactctatttgtccaatttgcaagtgtagatttcaagcgctttaaggtcaacggcagaaaaggaaatatcttcgtttcaaaactagacagaatcattcccacaaactgcgttgtgatgtgttcgttcaactcacagagtttaacctttcttttcatagagcagttaggaaacagtctgtttgtaaattctgtaagtggatattctgacatcttgtggccttggttggaaacgggatttcttcatattctgctagacagaagaattctcagtaacttccttgtgttgtgtgtattcaactcacagagttgaactatcctttacacagagcagacttgtaacactctttttgtggaatttgcaagtggagatttcagccgctttgaagtcaaagtagaaaaggaaatatcttcctataaaaactagacagaatgattctcataaactcctttgtgatgtgtgcgtccaactcacagagtttaacctttcttttcatagagcagttaggaaacactctgtttgtaaagtctgcaagtggatattcagacctccttgaggccttcgttggaaacgggatttcttcatattctgctagacagaagaattctcagtaacttccttgtgttgtgtgtattcaactgacagagttgaactttcatttagagagagcagatttgaaacactgtttttgtggaatttgcaagtggatatttcaagcgctttggggccaaaggcagaaaacgaaatatcttcgtataaaaactagacagaatcattctcagaaactgctgcgtgatgtgtgcgttcaactctcagagtttaacttttcttttcattcagcggtttggaaacactctgtttgtaaagtctgcacgtggacattttgaccacttagaggtcttctttggaaacgggtttttttcatgtaaggctagacagaagaattcccagtaacttccttgtgttgtgtgcattcaactcacagagttgaacgttcccttagacagagcagatttgaaacactctatttgtgcaatttgcaagtgtagatttcaagcgctttaaggtcaatggcagaaaaggaaatatcttagtttcaaaactagacagaatcattctcacaaactgcgttgtgatgtgttcgttcaactcacagagtttaacctttcttttcatagagcagttaggaaacagtctgtttgtcaattctgtaagtggatattctgacatcttgtggccttcgttggaaacgggatttcttcatattctgctagacagaagaattctcagtaacttccttgtgttgtgtgtattcaactcacagagttgaacgatcctttatagagagcagactttaaacactctttttgtggaatttgcaagtggagatttcagccgctttgaggtcaatggtagaaaaggaaatatcttcgtataaagactagacagaatgattctcagaaactcctttgtgatgtgtgcgttcaactcacagagtttaacctttcttttcatagagcagttaggaaacactctgtttgttaagtctgcaagtggatattcagacctctttgaggccttcgttggaaacgggttttcttcatattatgctagacagaagaattcccaagtaacttccatgtgttgtgtgtgttcaactcacagagttgaactttcatttacacagagtagatttgaaacactctttttgtggaatttgcaaatggagatttcaaactctttgaggccaaaggcagaaaaggaaatatcttcgtataaaaactagacagaaatcattctcagaaactgctctgcgatgtgtgcgttcaactctcagagtttaacttttcttttcattcagcagtttggaaacactctgtttgtaaagtctgcacgtggataacttgaccacttagaggacttcgttggaaacgggtttttttcctgtaaggctagacagaagaattcccagtaacttccttgtgttgtgtacattcaactcacagagttgaacgttcccttagacagagcagatttgaaacactctttttgtgcaattggcaaatggagatttcaagcgctttaagttcaatggcagaaaaggaaatatcttcgtttcaaaactagacagaaatcattcccacaaactgcgttgtgatgtgttcgttcaactcacagagtttaacctttcttttcatagagcagttaggaaacagtctgtttgtcaattctgtaagtggatattctgacatcttgtggccttcgttggaaacgggatttcttcatattctgctagacagaagaattctcagtaacttccttgtgttgtgtgtattcaactcacagagttgaacgatcctttacacagagcagacttgaaacactctttttgtggaatttgcaagtggagatttcagccgatttgacgtcaatggtagaataggaaatatcttcctatagaaactagacagaatgattctcagaaactcctttgtgatgtgtgtgttcaactcacagagtttaacctttctgttcatagagcagttaggaaacactctgtttgtaaagtctgcaagtggatattcagacctccttgaggccttcgttggaaacgggatttcttcatattctgctagacagaagaattcccagtaacttccttgtgttgtgtgtgttcaactcacagagttgaactttcatttacacagagcagatttgaaacactctttttgtggaatttgcaaatggagatttcaagcgctttgaggccaaaggcagaaaaggaagtatcttcgtataaaaactagacagaatcattctcagaaactgctctgcgatgtgtgcgttcaactctcagagtttaactttgcttttcattcagcagtttggaaacactctgtttgtaaagtctgcacgtggataatttgaccacttagaggccttcgttggaaacgggtttttttcatgtaaggctagacagaagaattcccagtaacttccttgtgttgtgtgcattcaactcacggagttgaacgttcccttagagcagatttgaaacactctatttgtgcaatttgcaagtgtagatttcaagcgctttaaggtcaatggcagaaaaggaaatatcttcgtttcaaaactagacagaatcattcccacaaactgcgttgtgatgtgttcgttcaactcacagagtttaacctttctgttcatagagcagttaggaaacactctgtttgtaaagtctgcaagtggatattcagacctcctagaggccttcgttggaaacgggatttctccatattctgctagacagaataattctcagtaacttccttgtgttgtgtgtattcaactcacagagttgaacgatcctttacacagagcagacttgaaacactctttttgtggaatttgcaagtggagatttcagccgctttgaggtcaatggtagaaaaggaaactatcttcgtataaagacaagacagaatgattctgagaaactcctttgtgatgtgtgcgttcaactcacagagtttaacctttcttttcatagagcagttaggaaacactctgtttgtaaagtctgcaagtggatattcagacctccttgaggccttcgttggaaacgggatttcttcctattatgctagacagaagaattctcagtaacttccttgtgttgtgtgtattcaactcacagagttgaatgatcctttacacagagcagacttgaaacactctttttgtggaatttgcaagtggagatttcagccgttttgagttcaatggtagaataggaaatatcttcctatagaaactagacagaatcattctcagaaactgctctgcgatgtgtgcgttcaactctcagagtttaacttttcttttcattcagcagtttggaaacactctgtttgtaaagtctgcacgtggataatttgaccacttagagaccttcgttggaaacgggtttttttcatgtaaggctagacagaagaattctcagtaacttccttgtgttgtgtgtattcaactcacagagttgaacgatcctttacacagagcagacttgaaacactctttttgtggaatttccaagtggagatttcagccgctatgtggtcaatggtagaatagcaaatatcttcctatagaaactagacagaatgattctcagaaactcctttgtgatgtgtgcgttcaactcacagattttaaccgttcttttcatagagcagttaggaaacactctgtttgtaaagtctgcaagtggatattcagacctctttgaggccttcgttggaaatgggatttcttcatattctgctagacagaagaattctcagtaacttccttgtgttgtgtgcattcaactcacagagttgaacgatcctttacacagagcagacttgaaacactcttttcgtggaatttgcaagtggagatttctgccgctttgaggtcaattgtagaataggaaatatcttcctgtagaaactagacagaatgattctcagaaactcctttgtgatgtgtgcgttcaactcacagactttaacctttcttttcatagagcagttaggaaacactctgtttgtaaagtctgcaagtggatattcagacctctttgaggccttcgttggaaacgggtttttttcatataaggctagacagaaagaattcccagtaacttccttgtgttgtgtgtgttcaactcacagagttgagctttcatttacacagagcagatttgaaacactctttttgtggaatttgcaagtggagatttcaagcgctttgaggccaaaggcagaaaaggaaatatcttcgtataaaaactagacagaatcattctcagaaactgctctgcgatgtgtgcgttcaactctcagagtttaacttttgttttcattcagcagtttggaaacactctgtttgtaaagtctgcacgtggataatttgaccacttagaggccttcgttggaaacgggtttttttcatgtaaggctagacagaagaattctcagtaacttccttgtgttgtgtgtattcaactgacagagttgaactttcatttagagagagcagatttgaaacactgtttttgtggaatttgcaattggagatttcaagcactttggggccaaaggcagaaaaggaaatatcttcgtttcaaaactagacagaatcattcccacaaactgcgttgtgatgtgtttgttcaactcacacagtttaacctttctgttcatagagcagttaggaaacactctgtttgtaaagtctgcaagtggatattcagacctccgtgaggccttcgttggaaacgggatttcttcatattctgctagacagaagaattctcagtaacttccttgtgttgtgtgtattcaactcacagagttgaacgatcctttacacagagcagacttgaaacactctttttgtggaatttgcaagtgcagatttcagccgctttgaggtcaatggtagaataggaaatatcttcctatagaaactagacagaatgattctcagaaactcctttgtgatgtgtgcgttcaactcacagagtttaacctttcttttcatagagcagttaggaaacactctgtttgtaaagtctgtaagtggatattcagacatccttgaggctttcgttggaaacgggatttcttcatattctgctagaaagaagaattctcagtaacttccttgtgttgtgtgtattcaactcacagagttgaatgatcctttacacagaacagtcttgaaacactctttttgtggaatttgcaagtggagatttcagccgctttgaggtcaacggtagaataggaaatatcttcctatagaaactagacagaatcattctcagaaactgctctgcgatgtgtgcgttcaactctcagagtttaacttttcttttcattcagcagtttggaaacactctgtttgtaaagtctgcacgtggatattttgaccacttagaggctcttcgttggaaacgggtttttttcctgtaaggctagacagtagaattcccagtaacttccttgtgttgtgtacattcaactcacagagttgaacgttcccttagacagagcagatgtgaaacactctttttgtgcaattggcaagtggagatttcaagcgctttaaggtcaatggcagaaaaggaaatatcttcgtttcaaaactagacagaatcattcccacaaactgcgttgtgatgtgttcgttcaactcaccagagtttaacctttcttttcatagagcagttaggaaacactctgtttgtaaattctgtaagtggatattctgacatcttgtggccttcgttggaaacgggatttcttcatattctgctagacagaagaattctcggaatcttccttgtgttgtgtgtattcaactcacagaattgaacgatggtttacacagagcagatttgaaacactctttttgtggaatttgcaagtggagatttcagccgctttgaggtcaatggtagaaaaggaaatatcttcgtataaaaactagacagaatgattctcagaaacttctttgtgatgtgtgcgttccactcacagagtttaacctttcttttcatagagcagttaggaaacactctgtttgtaaactctgcaagtggatattcagacctctttgaggccttcgttgcaaacgggatttcttcatattatgcctgagagaagaattctcagtaacttccttgtgttgtgtgtattcaactgacagagttgaactttcatttagagagagcagatttgaaacactgtttttgtggaatttgcaagtggagatttcaagcgctatggggccaaaggcagaaaaggaaatatctttgtataaaaactagacagaatcattctcagaaactgctctgcgatgtgtgtgttcaactctcacagtttaacttttcttttcattcagcagtttggaaacactctgtttgtaaagtctgcacgtggataatttgaccacttagaggccttcgttggaaacgggtttttttcatgtaaggctagacagaagaattcccagtaacttccttgtgttgtgtacattcaactcacagagttgaacgttcccttagacagagcagatttgaaacactctttttgtgaaattggcaagtggtgatttcaagcgctttaaggtcaatggcagaaaaggaaatatcttcgtttcaaaactagacagaatcattcccacaaactgcgttgtgaggtgttcgttcaactcacagagtttaacctttcttttcatagagcagttaggaaacagtctgtttgtaaattctgtaagtggatattctgacatcttgtggccttagttggaaacgggatttcttcatattctgctagacagaagaattctcagtaactttccttgtgttgtgtgtattcaactcacagagttgaacgatcctttacacagagcagacttgtaacactctttttgtggaattcgcaagtggagatttcagcagctttgaagtcaaaggtagaaaaggaaatatcttcctataaaaactagacagaatgattctcagaaacttctttgtgatgtgtgcgttcaactcacagaatttaacctttcttttcatagagcagttaggaaacactctgtttgtaaactctgcaagtggatattcagacctgtttgaggccttcgttggaaacgggatttcttcatactatgctagacagaagaattctcagtaacttccttgtgttgtgtgtattcaactcacagagttgaacgatcctttacacagagcagacttgtaacactctttttgtggaatttgcaagtggagatttcagccgctttgacgtcaaaggtagaaaaggaaatatcttcctatacaaactagacagaatcattctcagaaactgatctgtgatgtttgcgttcaactctcagagtttaacttttcttttcattcagcagtttggaaacactctgtttgtgaagtctgcacgtggataatttgaccactttgaggccttcgttggaaacgggtttttttcctgtaaggctagacagaagaattctcagaaacttccttgtgttgtgtgttttcaaatcacagagttgaacgatgctttacacagagtagacttgaaacactctttttgtgtaatttgcaagtggagatttcagccgctttgaggtcaatggtagaaaaggaaatatcttcgtataaaaattagacagaatgattctcagaaactcctttgtgatgtgtgcgttcaactcacagagtttaacctttcttttcatagagtagttaggaaacactctgtttgtaaagtctgcaagtggatattcagacctccttgagaccttcgttggaaacgggatttcttcatattatgctagacagaagaattctcagtaacttccttgtgttgtgtgtattcaactcacagagttgaacgatcctttacacagagcagacttgaaacactctttttgtggaatttgcaagtggagatttcagccgctttgaggtcaacggtagaataggaaatatcttcctatagaaactagacagagtgattctcataaactcctttgtgatgtgtgcgttcaactcacagagtttaacctttcttttcatagagcagttaggaaacactctgtttgtaaagtctgcaagtggatattcagacctccttgaggccttctttggaaacgggatttcttcatattctgatagacagaagaattctcagaaacttccttgtgttgtgtgttttcaactcacagagatgaacgatcctttacacagagcagacttgaaacactccttttgtggaatttgcaagtggagatttcagccgctttgagttcaatggtagaataggaaatatcttcctatagaaagtagacagaatgattctcagaaactcctttgtgatgtgtacgttcaactcacagagtttaacctttcttttcatagagcagttaggaaacactctgtttgtaaagtctgcatgtggatattgagacctctttgaggccttcgttggaaacgggtttttttcatataaggctagacagaagaattcccagtaacttccttgtgttgtgtgtgttcaacttacagagttgaactttcatttacacagagcagatttgaaacactctttttgtggaatttgtaagtggagatttcaagcgctttgaggccaaaggcagaaaaggaaatatcttcgtataaaaactagacagaatcattctcagaaactgctgtgtgatgtgtgcgttcaactctcagagtttaacttttcttttcattcagcggtttggaaacactctgtttgtaaagtctgcacgtggatattttgaccacttagaggccttcgttggaaacgggtttttttcatgtaaggctagacagaagaattcccagtaacttccttgtgttgtgtgcattcaactcacagagttgaacgttcccttagacacagcagatttgaaacactctatttgtgcaatttgcaagtgtagatttcaagcgctttaaggtcaatggcagaaaaggaaatatcttcgtttcaatactagacagaatcattcccacaaactgcgttgtgatgtgttcgttcaactcacagagtttaacctttcttttcatagagcagttaggaaacactctgttggtaaattctgtaagtggatattctgacatccttgtggccttcagtggaaacgggatttcttcatattctgctagacagaagaattctcagaatcttccttgtgttgtgtgtattcaactcacacagttgaacgattgtttacacagagcagatttgaaacactctttctctggaatttgcaagtggagatttcagccgctttgaggtccatggtagaaaaggaaatatcttcgtataacaactagacagaatgattctcagaaactcctttgtgatgtgtgcgttcaactcacagagtttaacctttctattcatagagcagttaggaaacactctgtttgtaaagtctgcaagtggatattcagacctctttgaggccttcgttggaaacgggtttttttcatataaggctagacagaagaattcccagtaacttccttgtgttgtgtgtgttcaactcacagagttgaactttgatttacacagagcagatttgaaacactctttttgtggactttgcaagtggagatttcaagcgctttgaggccaaaggcagaaaaggaaatatcttcgtttcaaaactagacagaatcattctcagaaactgctctgcgatgtgtgcgttcaactctcagagtttaacttttcttttcattcagcagtttggaaacactctgtttgtaaagtctgcacgtggatattttgaccacttagaggccttcgttggaaacgggttttttcctgtaaggctagacagaagaattcccagtaacttccttgtgttgtgtacattcaactcacagagttgaacgttcccttagacagagcagatttgaaacactctatttgtgcaattggcaagtggagatttcaagcgctttaaggtcaatggcagaaaaggaaatatcttcgtttcaaaactagacagaatcattcccacaaactgcgttgtgatgtgttcgttcaactcacagagtttaacctttcttttcatagagcagttaggaaacactctgttggtaaattctgtaagtggatattctgacatcttgtggccttcgttggaaacaggatttcttcatattctgctacacagaagaattctcagtaacttccttgtgttgtgtgtattcaactcacagagttgaacgatcctttacacagagcagacttggaacactctttttgtggaatttgcaagtggagatttcagccgctttgaggtccatggtagaaaaggaaatatcttcgtataaaaactagacagaatgattctcagaaactcctttgtgatgtgtgcgttcaactcacagagtctaacctttcttttcatagagcagttaggaaacactctgtttgtaaagtctgcaagtggatattcagacatctttgaggctttcgttggaaacgggatttcttcatattctgctagacagaagaattctcagtaacttccttgtgttgtgcgtattcaactgacagagttgaactttcatttagagagagcagatttgaaacactgtttttgtggaatttgcaagtggagatttcaagcgctttggggccaaaggcagaaaacgaaatatcttcgtataaaaactagacagaaatcattctcagaaaactgctgcgtgatgtgtgcgttcaactctcagagtttaacttttcttttcattcagcggtttggaaacactctgtttgtaaagtctgcacgtggatattttgaccacttagaggccttcgttggaaacgggtttttttcatgtaaggctagacagaagaattcccagtaacttccttgtgttgtgtacattcaactcacagagttgaacgttcccttagacagagcagatttgaaacactctttttgtgcaattggcaagtggagatttcaagcgctttgaggtcaatggcagaaaaggaaatatcttcgtttcaaaactagacagaatcattcccaaaaattgcgttgtgatgtgttcgttaaactcacagagtttaacctttctgttcatagagcagttaggaaacactctgtttgtaaagtctgtaagtggaaattctgacatcttgtggccttcgttggaaacgggatttcttcatattatgctagacagaagaattctcagaaacttccttgtgttgtgtgttttcaactcacagagttgaacgatcctttacacagagcagacttgaaacactccttttgtggaatttgcaagtggagatttcagccgctttgaggtcaatggtagaaaaggaaatatcttcgtataaaaactagacagaatgattctcataatctcctttgtgatgtgtccgttcaactcacagagtttaaccttccttttcatagagcagttaggaaacactctgtttgtaaagtctgcaagtggatattcagacctccttgaggccttcgttggaaacgggatttcttcatattctgctagacagaagaattcccagtaacttccttgagttgtgtgtggtcaactcacagagttgaactttcatttacacagagcagatttgaaacactctttttgtataatttgcaaatggagatttcaagcgctttgaggccaaaggcagaaaaggaaatatcttcttataaaaactagacagaatcattctcagaaactgctctgcgatgtgtgcgttcaactctcagagtttaacttttcttttcattcagcagtttggaaacactctgtttgtaaagtctgcacgtggatattttgaccacttagaggccttcgttggaaacgagtattttttcctgtaaggctagacagaagaattcccagtaacttccttgtgttgtgtacattcaactcacagagttgaacgttcccttagacagagcagatttgaaagactctttttctgcaattggcaaatggagatttcaagcgctttaaggtcaatggcagaaaaggaaatatcttcgtttcaaaactagacagaatgattctcataaactcctttgtgatgtgtgcgttcaactcacagagtttaacttttcttttcatagagcagttaggaaacactctgtttgtaatgtctgcaagtggatattcagacctccttgaggccttcgttggaaacgggatttcttcatattctgctagacagaagaattctcagtaacatccttgtgttgtgtgtattcaactcacagagttgaacgatcctttacacagagcagacttgaaacactctttttgttgaatttgcaagtggagatttcagccgctttgaggtcaatggtagaaaaggaaatatcttcgtataaaaactagacagaatgattctcagaaactcctttgtgatgtgtgcgttcatctcacagagtttaacttttcttttcatagagccgttaggaaacactctgtttgtaaagtctgcaagtggatattcagacctctttgaggccttcgttggaaacgggatttcttcatattatgctagacagaagaattcccagtaacttccatgtgttgtgtgtgttcaactcacagagttgaactttcatttacacagagcagatttgaaacactctttttgtggaatttgcaaatggagatttcaagcggtttgaggccaaaggcagaaaaggaaatatcttcgtataaaaactagacagaatcattctcagaaactgctgcgtgatgtgtgcgttcaactctcagagtttaacttttcttttcattcagcggtttggaaacactctgtttgtaaagtctgcacgtggatattttgaccacttagaggccttcgttggaaacgggttttttcatgtaaggctagacagaagaattcccagtaacttccttgtgttgtgtgcattcaactcacagagttgaacgttcccttagacagagcagatttgaaacactctatttgtgcaatttccaagtgtagatttcaagcgctttaaggtcaacggcagaaaaggaaatatcttcgtttcaaaactagacagaatcattcccacaaactgcgttgtgatgtgttcgttcaactcacagagtttaacctttgtgttcatagagcagttaggaaacactctgtttgtaaagtctgtaagtggatatactgacatcttgtggccttcgttggaaaccggatttcttcatattctgctagacagaagaattctcagtaacttccttgtgttgtgtgtattaaactcacagggttgaacgatcctttaaacagagcagacttgaaacactctttttgtggaatttgcaagtggagatttcagccgctttgaggtcaatggtagaaaaggaaagtatcttcgtataaagactagacagaatgattctcagaaactcctttgtgatgtgtgtgttcaactcacagagtttaacctttcttttcatagagcagttaggaaacactctgtttgtaaagtctgcaagtggatattcagacctctttgaggccttcgttggaaacgggtttttttcatatgaggctagacagaagaattcccagtaacttccttgtgttgtgtgtgttcaactcacagagttgaactttcatttacacagagcagattggaaacactctttttgtgaaatttgcaagtggagatttcaagtgctttgaggccaaaggcagaaaaggaaatatcttcgtataaaaactagacagaatcattctcagaaactgctctgcgatgtgtgctgttcaactctcagagtttaacttttcttttcattcagcagtttggaaacactctgtttgtaaagtctgcacgtggatattttgaccacttagaggccttcgttggaaacgggtttttttcctgtaaggctagacagaagaattcccagtaacttccttgtgttgtgtacattcaactcacagagttgaacgttcccttagacagagcagatttgaaacactctttttgtgcaattggcaagtggtgatttcagccgctttgaggtcaatggtagaaaaggaaatatcttcgtataaaaactagacagaatcattcccacaaactgcgttgtgatgtgttcgttcaactcacagagtttaacctttgtgttcttagagcagataggaaacactctgtttgtaaagtctgtaagtggatattctgacatcctgtggccttcgttggaaacgggatttcttcatattctgctagacagaagaattctcagtaacttccttatgttgtgtgtattcaactcacagagttgaactatcctttacacagagcagacttgaaacactctttttgtggaatttgcaagtggagatttcagccgctttgaggtcaatggtagaataggaaatatcttcctatagaaactagacagaatgattctcagaaactcctttgtgatgtgtgcgttcaactcacagagtttaacctttcttttcatagagcagttaggaatcactctgcttgtaaagtctgcaagtggatattcagccctctttgaggccttcgttggaaacgggtttttttcatataaggctagacagaagaattcccagtaacttccttgtgttgtgtgtgttcaactcacagagttgaactttcatttaaacagagcagatttgaaacactctttttgtggaatttgcaagtggagatttcaagcgctttgaggccaaaggtagaaaaggaaatatcttcgtttcaaaactagacagaatcattctcagtaaactgctctgcgatgtgtgcgttcaactctcagagtttaactttgcttttcattcagcagtttggaaacactctgtttgtaaagtctgcacgtggataatttgaccacttagaggccttcgttggaaacgggtttttttcatgtaaggctagacagaagaattcccagtaacttccttgtgttgtgtgcattcaactcacagagttgaacgttcccttagacagagcagatttgaaactctctatttgtgcaatttgcaagtgtagatttcaagcgctttaaggtcaatggcagaaaaggaaatatcttcgtttcaaaactagacagaatcattcccacaaactgcgttgtgatgtgttcgttcaactcacagagtttaacatttctgttcatagagcagttaggaaacactctgtttgtaaagtctgcaagtggatattcagacctccttgaggccttcgttggaaacgggatttcttcatattctgctagacagaagaattctcagtaacttccttgtgttgtgtgtattcaactcacagagttgaacgatcctttacactgagcagacttgaaacattctttttgtggaatttgcaagtggagatttcagccgctttgtggtcaatggtagaataggaaatatcttcctatagaaactagtcagaatgattctcagaaactcctttgtgatgtgtgcgttcaactcacagagtttaacctttcttttcatagagcagttagtaaacactctgtttggaaagtctgcaagtggatattcagacctctttgaggccttcgttggaaacgggatttcttcatattctgctagacagaagaattcccagtaactttcttgtgttgtgtgtgttcaactcacagggttgaactttcatttacacagagcagatttgaaacactctttttgtggaatttgcaaatggagatttcaagcgctttgaggccaaaggcagaaaaggaaatatcttcgtataaaaactagacagaatcattctcagaaactgctgcgtgatgtgtgcgttcaactctcagagtttaacttttcttttcattcagcggtttggaaacactctgtttgtaaagtctgcacgtggatattttgacctcttagaggccttcgttggaaacgggttttttttcatgtaaggctagacagaagaattctcagtaacttccttgtgttgtgtgtattcaactgacagagttgaactttcatttagagagagcagatttgaaacactctatttgtgcaatttgcaagtgtagatttcaagcgctttaaggtcaatggcagaaaaggaaatatcttcgttttaaaactagacagaatcattcccacaaactgcgttgtgatgtgttcgttcaactcacagagtttaacctttctgttcatagagcacttaggaaacactctgtttgtaaagtctgtaagtggatattctgacatcttgtggccttcgttggaaacgggatttcttcatattctgctagacagaagaattctcagaaacttccttgtgttgtgtgtattcaactcacagagttgaacgatcgtttacacagagcagacttgaaacactcttgttgtggaatttgcaagtggagatttcagccgctttgaggtcaatggtagaatagtaaatatcttcctaaagaaactagacagaatgattctcagaaactcctttgtgatgtgtgtgttcaactcacagagtttaacctttcttttcatagagcagttagtaaacactctgtttataaagtctgcaagtggatattcagacccctttgaggccttcgttggaaacgggatttcttcatattttgctagacagaagaattctcagtaacttgcttttgttgtgtgtattcaactgacagagttgaactttcatttagacagagcagaattgaaacactctttttctggaatttgcaagtggagatttcaagcgctttgaggccaaaggcagaaaaggatatatcttcgtataaaaactagacagaatcattctcagaaactgctctgcgatgtatgcgttcaactctcagagtttaacttttcttttcattcagcagtttagaaacactctgtttgtaaagtctgcacgtggatattttgaccacttagaggccttcgttggaaacgggtttttttcatgtaaggctagacagaagaattctcagtaacttccttgtgttgtgtgtattcaactcacagagttgaacgatcctttacacagagcagacttgaaacactctttttgtggaatttgcaagtggagatgtcagccgctttgtggtcaatggtagaataggaaatatcttcctatagaaactagacagaatgattctcagaaactcctttgtgatgtgtgcattcaacttacagagttcaacctttcttttcatagagcagttgggaaacactctgtttgtaaagtctgcaagtggatattcggacttatttgaggccttcgttggaagcgggatttcttcatattctgctagacagaagaattctcagtaacttccttgtgttgtgtgtattcaactcacagagttgaacgatcctttacacagagcagacttgaaacactctttttgtggaatttgcaagtggagatttcagccgctttgaggtcaatggtagaataggaaatatcttcctataggaaactagacagaatgattctcagaaactcctttgtgatgtgtgcgttcaactcacagagttcaacctttcttttcatagagcagttgggaaacactctgtttgtaaagtctgcaagtggatattcagacatccttgaggctttcgttggaaacgggatttcttcatattatgctagaaagaagaattctcagtaacttccttgtgttgtgtgtattcaactgacagagttgaactttcatttagagagagcagatttgaaacactgatttgtgaaatttgcaagtggagatttcaagcgctttggggccaaaggcagaaaaggaaatatcttcgtataaaaactagacagaatcattctcagaagctgctgcgtgatgtgtgcgttcaactctcagagtttaacttttcttttcattcagcggtttggaaacactctgtttgtaaagtctgcacgtggatattttgaccacttagaggccttcgttggaaacgggtttttttcatgtaaggctagacagaagaattcccagtaacttccttgtgttgtgtgcattcaactcacagagttgaacgttcccttagacagagcagatttgaaacactctatttgtgaaatttccaagtgtagatttcaagcgctttaaggtcaacggcagaaaaggaaatatcttcgtttcaaaactagacagaatgattctcagaaactcctttgtgatgtgtgcgttcaactcacagagtttaacctttcttttcatagagcagttaggaaacactctgtttgtaaagtctgcaagtggatattcagacctctttgaggccttctttggaaacgggatttcttcatattctgctagagagaagaattctcagtaacttcattgtgttgtgtgtattcaactcacagatttcaacgatcctttacacagagcagacttgaaacactctttttctggaatttgcaagtgtagatttcagccgctttgaggtcaatggtagaataggaaatatcttcctatagaaactagacagaatgattctcagaaactcctttgtgatgtgtgcgttcaactcacagagttcaacctttcttttcatagagcagttaggaaacactctgtttgtaaagtctgcaagtggatattcagacatccttgaggctttcgttggaaacgggatttcttcatattatgctagaaagaagaattctcagtaacttctttgtgttgtgtgtattcaactgacagatttgaactttcatttagagagagcagatttgaaacactgtttttgtggaatttgcaagtggagatttcaagcgctttggggccaaagtcagaaaaggaaatatcttcgtataaaaactagacagaatcattctcagaaactgctgcgtattgtgtgcgttcaactctcagagtttaacttttcttttcattcagcggtttggaaacactctgtttgtaaagtctgcacgtggatattttgaccacttagaggccttcgttggaaacgggattttttcatgtaaggctagacagaagaattcccagtaacttccttgtgttgtgtgcattcacctcacagagttgaacgttcccttagacagagcagatttgaaacactctatttgtgcaatttgcaagtgtagatttcaagcgctttaaggtcaatggcagaaaaggaaatatcttcgtttcaaaactagacagaatgattctcagaaactcctttgtgatgtgtgcgttcaactcacagagttcaacctttcttttcatagagcagttgggaaacactctgtttgtaaagtctgcaagtggatattcagacttctttgaggccttcgttggaagcgggatttcttcatattctgctagacaaaagaattctcagtaacttcctagtgttgtgtgtattcaactcacagagttgaacgatcctttacacagagcagacttgaaacactctttttgtggaatttgcaagtggagatttcagccgctttgaggtcaatggtagaataggaaatatcttcgtatagaaactagacagaatgactctcataaactcctttgtgatgtgtgcgttcaactcacagagtttaacctttcttttcatagagcagttaggaaacactctgtttgtaaagtctgcaagtggatattcagacctccttgaggccttcattggaaacgggatttcttcatattctgctagacagaagaattcccagtaacttccttgtgttgtgtgtgttcaactcacagagttgaactttcatttacccagagcagatttgaaacactctttttgtggaatttgcaagtggagatttcaagcgctttgaggccaaaggcagaaaaggaaatatctccgtttcaaaactagacagaatcattctcagaaactgctctgcgatgtgtgcgttcaactctcagagtttaacttttgttttcattcggcagtttggaaacactctgtttgtaaagtctgcacgtggataatttgaccacttagaggccttcgttggaaacgggtttttttcatgtaaggctagacagaagaattctcagtaacttccttgtgttgtgtgtattcaactcacacagttgaacgatcctttacagagagcagacttgtaacactctttttgtggaatttgcaagtggagatttcagccgctttgaagtcaaagtagaaaaggaaatatcttcctataaaaactagacagaatgattctcagaaactcctttgtgatgtgtgcattcaactcacagagtttaacctttcttttcatagagcagttaggaaacactctgtttgtaaagtctgcaagtggatattcagacctatttgaggccttcgttggaaacgggatttcttcatattctgctagagagaagaattctcagtaacttcattgtgttgtgtgtattcaactcacagatttcaacgatcctttacacagagcagacttgaaacactctttttctggaatttgcaagtggagatttcagccgctttgaggtcaatggtagaataggaaatatcttcctatagaaactagacagaatgattctcagaaactcctttgtgatgtgtgcgttcaactcacagagtttaacctttcttttaatagagcagttaggaaacactctgtttgtaaagtctgcaagtggatattcagacctctttgaggccttcgttggaaacgggtttttttcatataaggctagacagaagaattcccagtaacttccttgtgttgtgtgtgttcaactcacagagttgaacgttcccttagacagagcagatttgaagcactctttttgtggaatttgcaagtggagatttcaagcgctttgaggccaaaggcagaaaaggaaatatcttcgtataaaaactagacagaatcattctcagaaactgctctgcgatgtgtgcgttcaactctcagattttaacttttcttttcattcagcagtttggaaacactctgtttgtaaagtctgcacgtggatattttgaccacttagaggccttcgttggaaacgggtttctttcttgtaaggctagacagaagaattcccagtaacttccttgtgttgtgtacattcaactcacagagttgaacgttcccttagacagagcagatttgaaacactctttttgtgcaattggcaaggggagattttaagcgctttaaggtcaatggcagaaaaggaaatatcttcctttcaaaactagacagaatgattctcagaaactcctttgtgatgtgtgcgttaaactcacagagtttaacctttcttttcatagagcagttaggaaacactctgtttgtaaagtctgcaagtggatattcagacatccttgaggctttcgttggaaacgggatttcttcatattctgctagaaagaagaattctcagtaatttccttgtgttgtgtgtattcaactcacagagttgaacgatcctttacagagagcagacttgaaacactctttttgtggaatttgcaagtggagatttcagccgctttgaagtcaatggtagaataggaaatatcttcctacagaaaagagacagaatgattctcagaaactcctttgtgatgtgtgcgttgaactcagagagtttaacctttcttttcatagagcagttaggaaacactctgtttgtaaagtctgcaagtggatattcagacatccttgaggctttcgttggaaacgggatttcttcatattctgctagaaagaagaattcccagtaacttccttgtgttgtgtgtgttcaactcacagagttgaactttcatttacacagagcagatttgaaagactctttttgtggaatttgcaagtggagatttcaagcgctgtgaagccaaaggcagaaaaggaaatatcttcgtataaaaactagacagaatcattctcagaaactgctgcgtgatgtgtgcgttcaactctcagagtttaacttttcttttcattcagcggtttggaaatactgtgtttgtaaagtctgcacgtgcatattttgaccactaagaggccttcgttggaaacgggtttttttcatgtaaggctagacagaagaattcccagtaacttccttgtgttgtgtgcattcaactcacagagttgaacgttcccttagacagagcagatttgaaacactctatttgtccaatttgcaagtgtagatttcaagcgctttaaggtcaacggcagaaaaggaaatatcttcgtttcaaaactagacagaatcattcccacaaactgcgttgtgatgtgttcgttcaactcacagagtttaacctttctgttcatagagcagttaggaaacactctgtttgtaaactctgtaagtggatattctgacatcttgtggccttcgttggaaacgggatttcttcacattctgctagacagaagaattctcagaatcttccttgtgtagtgtgtattcaactcacagagttgaacgatcctttacacagagcagacttgaaacactctttttgtggaatttgcaagtggagatttcagccgctttgaggtccatggtagaaaaggaaatatcttcgtataaaaactagacagaatgattctcagaaacttctttgtgatgtgtgcattcaactcacagagtttaacctttcttttcatagagcagttaggaaacactctgtttgtaaactctgcaagtggatattcagacctctttgaggccttcgttggaaacgggatttcttcatactatgctagacagaagaattctcagtaacttccttgtgttgtgtattcaactgacagagttgaactttcatttagagagagcagatttgaaacactgtttttgtggaatttgcaagtggagatttcaagcgctttggggccaaaggcagaaaaggaaatatcttcgtataaaaactagacagaatcattctcagaaactgctctgcgatgtgtgcgttcaactctcagagtttaacttttcttttcattcagcagtttggaaacactctgtttgtaaagtctgcacgtggatattttgaccacttagaggccttcgttggaaatgggtttttttcctgtaaggctagacagaagaattcccagtaacttccttgtgttgtgtgcattcaactcacagagatgaacattcccttagacagagcagatttgaaacactctatttgtgtaatttgcaagtgtagatttcaagcgctttaaggtcaatggcaaaaaaggaaatatctgcgtttcaaaactagacagaatcattcccacaaactgcgttgtgatgtgttcgttcaactcacagactttaacctttctgttcatagagcagttaggaaacacactgtttgtaaagtctgcaagtggatattcagacctccttgaggccttcgttggaaacggtatttcttcatattctgctagacagaaaaattctcagtaacttccttgtgttgtgtgtattcaactcacagagttgaactatcctttacaaagagcagacttgaaacactctttttgtggaatttgcaagtggagatttcagccgctttgaggtcaatggtagaaaaggaaatatcttcgtataaaaactagacagaatgattctcataaactactttgtgatgtgtgcgttcaactcacagagtttaacttttcttttcatagagcagttaggaaacactctgtttgtaaagtctgcaagtggatattcagacctctttgaggccttcgttggaaacgggatttcttcatattctgctagacagaagaattctcagcaacttccttgtgttgtgtgtattgaactcacagagttgaacgatcctttacacagagcagacttgaaacactctatttgtagaatttgcaagtggagatttcagccgctttgaggtcaatagtagaaaaggaaatatcttcgtagaaaaactagacagaatgattctcagaaactcctttgtgatgtgtgtgttcaacgcacagagtttaacctttcttttcatagagcagttaggaaacactctgtttgtaaagtctgcaagtggatattcagacctctttgaggccttcgttggaaacgggtttttttcatataaggctagacagaagaattcccagtaacttccttgtgttgtgtgtgttcaactcacagagttgaactttcgtttacacagagcagatttgaaacactctttttgtggaatttgcaagtggagatttcaagcgctttgaggccaaaggcagaaaaggaaatatcttcgtttcaaaactagacagaatcattctcagaaactgctctgtgatgtgtgcgttcaactctcagagtttaacttttcttttcattcagcactttggaaacactctgtttgtaaagtcttcacgaggatattttgaccacttagaggtctttgttggaaacgggtttttttcacataaggctagacagaagaattcccagtaacttccttgtgttgtgtgcattcaactcacagagttgaacgttccttagacacagcagatttgaaacactctatttgtgcaatttgcaagtgtagatttcaagcgctttaaggtcaatggcagaaaaggaaatatcttcgtttcaaaactagacagaaatcattcccacaaactgcgttgtgatgtgttcgttcaactcacagagtttaacctttctgttcatagagcagttaggaaacactctgtttgtaaagtctgtaagtggatattcagacatcttgtggccttcgttggaaacgggatttcttcatattctgctagacagaagaattctcagtaacttccttgtgttgtgtgtattcaactcacagagttgaacgatcctttacacagagcagagttgaaacactctttttgtggaatatgcaaggggagatttctgccgctttgagtcaatggtagaaaaggaaatatcttcgtataaagactagacagaatgattctcagaaactcctttgtgatgtgtgcgttcaactcacacagtttaacctttcttttcatagagcagttgggaaacactctgtttgtaaagtctgcaagtggatattcagacctccttgaggccttcgttggaaacgggatttcttcatattatgctagacagaagaattctcagtaacttccttgtgttgtctgtattcaactcacagagttgaacgatcctttacacagagcagacttgaaacactctttttgtggaatttgcaagtggagatttcagccgctttgaagtcaatggtagaataggaaatatcttcctatagaaactagacagaatgattctgagaaactcctttgtaatgtgtgcgttcaactcacagagtttaacctttcttttcatagagcagttaggaaacactctgtttgtaaagtctgcaagtggatattcagacctccttgaggccttcgttggaaacgggatttcttcatattatgctagacagaagaattcccagtaacttccttgtgttgtgtgtgttcaactcacagagttgaactttgatttacacagagcagatttgaaacactctttttgtggaatttgcaagtttagatttcaagcgctttgaggccaaaggcagaaaaggaaatatcttcgtataaaaactagacagaatcattctcagaaactgctctgtgatgtgtgcgtccaactctcagagtttaaattttcttttcattcagcagtttggaaacactctgtttgtaaagtctgcacgtggatattttcagcacttagaggccttcgttggaaactgttttttttcatgtaaggctagacagaagaattcccagtaacttccttgtgttgtgtgcattcaactcacagagttgaacgttcccttagacagagcacatttgaaacactctatttgtgcaatttgcaattgtagatttcaagcgctttaaggtcaatggcagaaaaggaaatatcttcgttttaaaaatagacagaatcattcccacaaactgcgttgtgatgtgttcgttcaactcacagagtttaacctttctgttcatagagcagttaggaaacactctgtttgtaaagtctgtaagtggatattctgacatattgtggccttcgttggaaacgggacttcttcatattctgctagacagaagaattctcagtaacttccttgtgttgtgtgtattcaactcacagagttgcacgatcctttacacagagcggacttgaaacactctttttgtggaatttgcaagtggagattttagccgatttgaggtcaatggtagaataggaaatatcttcctatagaaactagacagaatgattctcagaaactcctttgtgatgtgtgtgttcaactcacagagtttaacctttcttttcatagagcagttagtaaacactgtgtttataaagtctgcaagtggatattcagacccctttgaggccttcgttggaaacgggatttcttcatattatgctagacagaagaattctcagtaacttccttgtgttatgtgtattcaactgacagagttgaactttcatttagagagagcagatttgaaacactgtttttgtggaatttgcaagtggagatttcaagcgctttggggccaaaggcagaaaaggaaatatcttcgtatgaaaactagacagaatcattctcagaaactgctgcgtgatgtgtgcgttcaactctcagagtttaacttttcttttcattcagcggtttggaaacactctgtttgtaaagtctgcacgtggatattttgaccacttagaggccttccttggaaacgggtttttttcatgtaaggctagacagaagaattcccagtaacttccttgtgttgtgtgcattcaactcacagagttgaacgttcccttagacagagcagatttgaaacactctatttgtgcaatctgcaagtgtagatttcaagcgctttaaggtcaacggcagaaaaggaaatatcttcgtttcaaaactagacagaatcattcccacaaactgcgttgtgatgtgttcgttcaactcacagagtttaacctttctgttcatagagcacttaggaaacactctgtttgtaaagtctgcatgtggatattcagacctcctagaggccttcgttggaaacgggatttcttcatattctgctagacagaagaattctcagtaacttccttgtgttgtgtgtattcaagtcacagagttgaacgatcctttacacagagcagatttgaaacactctttttgtggaatttgcaagtggagatttctgccgctttgtggtcaatggtggaaaaggaaatatcttcatataaaaacaagacagaatgattctcataaactcctttgtgatgtgtgcgttcaactcacagagtttaacttttcttttcatagagcagttaggaaacactctgtttgtaaagtctgcaagtggatattcagacctttttgaggccttcgttggaaacgggatttcttcatattatgctagacagaataattctcagtaacttccttgtgttgtgtgtattcaactgacagagttgaactttcatttagagagagcagatttgaaacactgtttttgtggaatttgcaagtgtagatttcaagcgctttggggccaaaggcagaaaaggaaatatcttcgtataaaaagtagacagaatcattctcagaaactgctctgcgatgtgtgcgttcaactctcagagtttaacttttcttttcattcagcagtttggaaacactctgtttgtaaagtctgcacgtggataatttgaccacttagaggccttcgttggaaacgggtttttttcgtgtaaggctagacagaagaattcccagtaacttccttgtgttgtgtgcattccactcacagagttgaacgttcccttagacagagcagatttgaaacactctatttgtgcaatttgcaagtgtagatttcaagcgctttaaggtcaatggcagaaaaggaaatatcttcgtttcaaaactagacagaatcattcccacaaactgcgttgtgatgtgttcgttcaactcacagagtttaacctttctgttcatagagcagttaggaaacactctgtgtgtaaagtctgcaagtggatattcagacctctttgaggccttcgttggaaacgggatttcttcatattctgctagacagaagaattctcagtaactttccttgtgttgtgtgtattcaactcacagagttgaatgatcctttacacagaacagtcttgaaacactctttttgtggaatttgcaagtggagatttcagccgctttgaggtcaatggtagaataggaaatatcttcctatagaaactagacagaatgattctcagaaactcctttgtgatgtgtgcgttgaactcacagagtttaacctttcttttcatagagcagttaggaaacactctgtttgtaaagtctgcaagtggatattaagacctctttgacgccttcgttggaaacgggatttcttcatattctgctagacagaaggaattcccagtaacttccttgtgttgtgtgtgttcaactcacagagttgaactttcatttacacagagcagatttgaaacactctttttgtggaatttccaagtggagatttcaagcgctttgaggccaaaggcagaaaaggaaatatcttcgtataaaaactagacagaatcattctcagaaactgctctgcgatgtgtgcgttcaactctcagagtttaacttttcttttcattcagcagtttggaaacactctgtttgtaaagtctgcaagtggatattttgaccatttagaggccttcgttggaaacgggtttttttcctgtaaggctagagagaagaattcccagtaactcccttgtgttgtgtgcattcaactcacagagttcaacgttcccttagacagagcagatttgaaacactctatttgtgcaatttgcaagcgtagatttcaagcgctttaaggtcaatggcagaaaaggaaatatcttcgtttcaaaactagacagaataattcccacaaactgcgttgtgatgtgttcgttcaactcacagagtttaacctttctgttcatagagcagttaggaaacactctgtttgtaaagtctgtaagtggatattctgacatcttgaggccttcgttggaaacgggatttcttcatattctgctagacagaagaattctcagtaacttccttgtgttgtgtgtattgaactcacagagttgaacgatcctttacacagagcagtcttgaaacactgtttttgtggaatttgcaagtggagatttctgccgctttgaggtcaatggtagaataggaaatatcttcctatagaaactagacagagtgattctcagaaactcctttgtgatgtgtgcgttcaactcacagagtttaacctttcttttcatagagcagttaggaaacactctgtttgtaacgtctgcaagtggatattcagacctccttgaggccttcgttggaaacgggatttcttcatattctgctacagagaagaattctcagtaacttccttgtgttgtgtgtattcaactcacagagttgaacgttcctttacacagagcaggacttgaaacactctttttgtggaatttgcaagtggagatttcaagcgctttgaggccaaaggcagaaaaggaaatatcttcgtataaaaactagacagaatcattctcagaaactgctctgcgatgtgtgtgttcaactctcagagtttaacttttcttttcattcagcagtttggaaacactctgtttgtaaagtctgcacgtggatattttgaccacttagaggccttcgttggaaacgggtttttttcctgtaaggctagacagaagaattcccagtaacttccttgtgttgtgcacattcaactcacagagttgaacgttcccttagacagagcagatttgaaacactctttttgtgcaattggcaagtggagatttcaagcgctttgaggtcaatggcagaaaaggaaatatcttcgtttcaaaattagacagaatgattctcagaaactcctttgtgatgtgtgcattcaactcacagagtttaacctttcttttcatagagcagttaggaaacactctgtttgtatagtctgcaagtggatattcagacctctttgaggccttcgttggaaacgggatttcttcatattatgctagacagaagaattctcagtaacttccttgtgttgtgtgtattcaactcacagagttgaatgatcctttacacagaacagacttgaaacactctttttgtggaatttgcagggggagatttcagccgctttgaggtcaatggtagaaaaggaaatatcttcctatagaaactagacagaatgattctcagaaactcctttgtgatgtgtgcgttcaactcacagagtttaacctttcttttcatagagcagttaggaaacactctgtttgtaaagtctgcaagtggatattcagacatccttgaggctttcgttggaaaagggatttcttcatattctgctagaaagaagaattctcagaaacttccttgagttgtgtgtattcaactcacagagttgaacgatcgtttacacagagcagacttgagacactctttttgtggaatttgtaagtggagatttcagccgatttgaggtcaatggtagaaaaggaaatatcttcatataaaaactagacagaatcattctcagaaactgctctgcgatgtgtgcgttcaactctcagagtttaacttttcttttcattcagcagtttggaaacactctgtttgtaaagtctgcacgtggataacttgaccacttagaggacttcgttggaaacgggtttttttcctgtaaggctagacagaagaattcccagtaacttccttgtgttgtgtacattcaactcacagagttgaacgtttccttagagagagcagatttgaaacactctttttgtgcaattggcaagtggtgatttcagccgctttgaggtcaatggtggaaaaggaaatatcttcgtataaaaactagacagaatcattctcagaaaatgctctgtgatgtgtgcgttcaactctcagagtttaacttttcttttcattcagcactttggaaacactctgtttgtaaagtctgcacgaggatcttttgaccacttagaggtctttgttggaaacgggtttttttcacgtaaggctagacagaagaattcccagtaacttccttgtgttgtgtatattcaactcacagagttgaacgatcctttacacagagcagatttgaaacactctttttgtggaatttgcaagtggagatttcagccgctttgaggtcaatggtagaaaaggaaatatcttcgtttcaaaactagacagaatgattctcagaaactcctttgtgatgtgtgcgttcaactcacagaagtttaacctttcttttcatagagcagttaggaaacactctgtttgtaaagtctgcaagtggatattcagacatctttgaggctttcgttggaaacgggatttcttcatattctgctagacagaagaattctcagaaacttccttgtgttgtgtgtattcaactcacagagttgaacgatcctttacacagagcagacttgaaacactccttttctggaatttgcaggtggagatttcagccgctttgaggtcaatggtagaatagtaaatatcttcgtataaaaactagacagtatcattctcagaaactgctctgcgatgtgtgcgttcaactctcagagtttaacttttcttttcattcagcagtttggaaacactctgtttgtaaagtctgcacgtggatattttgaccacttagaggccttcgttggaaatgggtttttttcctgtaaggctagacagaagaattcccagtaacttccttgtgttgtgtacattcaactcacagagttgaacgttcccttagacagagcagatttgaaacactttttttgtgcaattggcaaatggagatttcaagcgctttaaggtcaatggcagaaaaggaaatatcttcgtttcaaaactagacagaatcattcccacaaactgcgttgtgaggtgttcgttcaactcacagagtttaacctttcttttcatagagcagttaagaaacagtctgtttgaaaattctgtaagtggatattctgacatcttgtggccttcgttggaaacgggatttcttcatattctgctagacagaagaattctcagaatcttccttgtgttgtgtgtattcaactcacagagttgaacgatggtttacaaagagcagatttgaaacactcatttggtggaatttgcaagtggagatttcagccgctttgaggtcaatggtagaaaaggaaatatcttcgtataacaactagacagaacgattctcagaaactccgttgtgatgtttgcgttcaactcacagagtttaacctttcttttcatagagcagttaggaaacactctgtttgtaaagtctgcaagtggatattcagacctctttgaggccttcgttggaaacgggatttcttcctattctgctagacagaagaattcccactaacatccttgtgttgtgtgtgttcaactcacagagttgaactttcatttacacagagcagatttgaaagactctttttgtggaatttgcaaatggagatttcaagcgctttgaggccaaaggcagaaaaggaaatatcttcgtttcaaaactagacagaatcattctcagaaactgctgcgtgatgtgtgcgttcaactctcagagtttaacttttcttttcattcagcggtttggaaacactctgtttgtaaagtctgcaagtggatattttgaccacttagaggccttcgttggaaacgggtttttttcatgtaaggctagacagaagaattcccagtaacttccttgtgttgtgtgcattcaactcacagagttgaacgttcccttagacagagcagatttgaaacactctatttgtgcaatttgcaagtgtagatttcaagcgctttaaggtcaatggcagaaaaggaaatgtcttcgtttcaaaactagacagaatcattcccacaaactgcgttgtgatgtgttcgttcaactaacagagtttaacctttcttttcatagagcagttaggaaacagtctgtttgtaaattctgtaagtggatattctgacatcttgtggccttcgttggaaacgggatttcttcatattctgctagacagaagaattcccagtaacttccttgtgttgtgtgtgttcaactcacagtagttgaactttcatttacacagagcagatttgaaacactctttttgtggaatttgcaaatggagatttcagccgcgttgaggtcaatggtagaaaaggaaatatcttcgtttcaaaactagacagaatgattctcagaaactcctttgtgatgtgtgtgttcaactcacagagtttaacctttcttttcatagagcagttagtaaacactctgtttataaagtctgcaagtggatattcagacccctttgaggccttctttggaaacgggatttcttcatattctgctagacagaagaattcccagtaacttccttgtattgtgtgtgttcaactcacagagttgaactttcatttacacagagcagatttgaaacactctttttgtggaatttgcaagtggagatttcaagcgctttgaggccaaaggcagaaaaggaaatatcttcgtataaaaactagacagaatcattctcagaaactgctctgtgatgtgtgcgttcaactctcagagtttaacttttcttttcattcagcagtttggaaacactctgtttgtaaagtctgcacgtggataatttgaccacttagaggccttcgttggaaacgggtttttttcatgtaaggctagacagaagaattcccagtaacttccttgtgttgtgtacattcaactcacagagttgaaccttcccttagacagagcagatttgaaacactctttttgtgcaattggcaagtggagatttcaagcgctttgaggtcaatggcagaaaaggaaatatcttcgtttcaaaactagacagaatcattcccacaaactgcgttgtgatgtgttcgttcaactcacagcagtttaacctttctgttcatagagcagttaggaaacactctgtttgtaaagtctgtaagtggatattctgacatcttgtggccttcgttggaaacgggatttcttcatattctgctagacagaagaattctcagtaacttctttgtgttgtgtgtattcaactcacagagttgaacgatcctttacacagagcagacttgaaacactctttttgtggaatttgcaagtggagttttcagccgctttgaggtcaatggtagaataggaaacatcttcctatagaaactagacagaatgattctcagaaactcctttgtgatgtgtgcgttcaactcacagagtttaacctttcttttcatagagcagttgggaaacactctgtttgtaaagtctgcaagtggatattcagacctccttgaggctttcgttggaaacgggatatcttcatattctgctagaaagaagaattctcagaaacttccttgtgttgtgtgtattcaactcacagagttgaacgttcgtttacacagagcagacttgagacactctttttgtggaatttgtaagaggagatttcagccgctttgaggtcaatggtagaaaaggaaatatcttcatataaaaactagacagaatgattctcagaaactcctttgtgatgtgtgcgttcaactcacagagtttaacctttcttttcatagagcagttagtaaacactctgtttataaagtctgcaagtggatattcagacccctttgaggccttcgttggaaacgggatttgttcatattctgctagacagaagaattcccagtaacttccttgtgttgtgtgtgttcaactcacagagttgaactttcatttacacagagcagatttgaaacactttttttgtggaatttgcaagtggagatttcaagcgctttgaggccaaaggcagaaaaggaaatatcttcgtataaaaactagacagaatcattctcagaaactgctctgcgatgtgtgcgttcaactctcagagtttaactttgcttttcattcagcagtttggaaacactctgtttgtaaagtctgcacgtggataatttgaccacttagaggccttcgttggaaacgggtttttttcatgtaaggctagacagaagaattcccagtaacttccttgtgttgtgtacattcaactcacagagttgaacgttcccttagacagagcagatttgaaacactctttttgtgcaattggcaaatggagatttcaagcgctttaaggtcaatggcagaaaaggaaatatcttcgtttcaaaactggacagaatgattctcataaactcctttgtgatgtgtgcgttcaactcacacagtttaacctttcttttcatagagcagttaggaaacactctgtttgtaaagtctgcaagtggatattcagacctctttgaggccttcgttggaaaccggatttcttcatattctgctagacagaagaattctcagtaacttccttgtgttgtgtgtattcaactcacagagttgaacgatcctttacacagagcagacttgaaacactctttttgtggaatttggaagtggagatttcagccgctttgaggtcaatagtagaaaaggaaatatcttcgtagaaaaactagacagaatgattcccagaaactcctttgtgatgtgtgcgttcaactcacagagtttaacctttctattcatagagcagttaggaaacaatctgtttgtaaagtctgcaagtcgatattcagacgtctttgcggccttcgttggaaacgggtttttttcatataaggctagacagaagaattctcagtaacttccttgtgttgtgtgtattcaactgacagagttgaactttcatttagatagagcagatttgaaacactgtttttgtggaatttgcaagtggagatttcaagcgctttggggccaaaggcagaaaaggaaatatcttcgtataaaaactagacagaatcattctcagaaactgctgcgtgatgtgtgcgttcaactctcagagtttaacttttcttttcattcagcggtttggaaacactctgtttgtaatgtctgcacgtggatattttgaccacttagaggccttcattggaaacgggtttttttcatgtaaggctagacagaagaattcccagtaacttccttgtgttgtgtgcattcaactcacagagttgaacgttcccttagacagagcagatttgaaacactctatttgtgcaatttgcaagtgtagatttcaagcgctttaaggtcaacggcagaaaaggaaatatcttcgattcaaaactagacagaatcatttccacaaactgcgttgtgaagtgctcgttcaactcacatagtttaacctttctgttcatagagcagttaggaaacactctgtttgtagtgtctgtaagtggatattctgacatcttgtggccttcgttggaaacggaatttcttcatattctgctagacagaagaattctcagaaacttccttgtgttgtgtgtattcaactcacagagttgaacgatcctttacacagagcagacttgaaacactctttttgcggaatttgcaagtggagatttcagccgctttgaggtcaatggtagaataggaaatatcttcctatagaaactagacagaatgattctcataaactcctttgtgatgtgtgcgttcaactcccagagtttaaactttcttttcatagagcagttaggaaacactctgtttgtaaagtctgcaagtggatattcagacctgcttgaggccttctttggaaacgggatttcttcatattatgctagacagaagaattctcagtaacttccttgtgttgtgtgtattcaactgacagagttgaactttcatttcgagagagcagatttgaaacactgtttttgtggaatttgcaagtggagatttcaagcgctttggggccaaaggcagaaaaggaaatatcttcgtataaaaactagacagaatcattctcagaaactgctctgcgatgtgtgcgttcaactctcagagtttaacttttctttttattcagcagtgtggaaaaactctgtttgtaaagtctgcacgtggatattttgaccacttagaggccttcgttggaaacgggtttttttcctgtaaggctagacagaagaattcccagtaacttccttgtgttgtgtacattcaactcacagagttgaacgttcccttagacagagcagatttgaaacactctttttgtgcaattggcaagtggtgatttcagccgctttgaggtcaatggtagaaaaggaaatatcttcgtattaaaactagacagaatgattctcagaaactcctttgtgatgtgtgcgttcaactcacagagtttaacctttcttttcatagagcagttgggaaacactctgtttgtaatgtctgcaagtggatattcagacttctttgaggccttcgttggaagcgggatttcttcatgttctgctagacagaagaattctcagaaacttccttgtgttgtgtgttttcaactcacagagttgaacgatcctttacacagagcagacttgaaacactccttttgtggaatttgcacgtggagatttcagccgctttgaggtcaatggtagaataggaaatatcttcctatagaaagtagacagaatgattctcagaaaatcctttgtgatgtgtgcgttcaactcacagagtttaacttttcttttcatagagcagttaggaaacactctgtttgtaaagtctgcaagtggatattcagacctctttgaggccttggttggaaaccggatttcttcatattatgctagacagaagaattctcagtaacttccttgtgttttgtgtattcaactgacagagttgaactttcatttagagagagcagatttgaaacactgtttttgtggaatttgcaagtggagatttcaagcgctttggggccaaaggcagaaaacgaaatatcttcgtataaaaactagacagaatcattctcaaaaactgctctgcgatgtgtgcgttcaactctcagagtttcacttttcttttcattcagcagtttggaaacactctgtttgtaaagtctgcacgtggataatttgaccacttagaggctttggttggaaacgggtttttttcatgtaaggctagacagaagaattcccagtaacttccttgtgttgtgtacattcaactcacagagttgaacgttcccttagacagagcagatttgaaacactctttttgtgcaattggcaagtggagatttcaagcgctttgaggtcaatggcagaaaaggaaatatcttcgtttcaaaactagacagaatcattcccaaaaactgcgttgtcatgtgttcgttcatctcacagagtttaacctttcttttcatagagcagttaggaaacagtctgtttgtaaattctgtaagtggatattctgacatcttgtggccttcgttggaaacgggatttcttcatattctgctagatagaagaattctcagaatcttccttgtgttgtgtgtattcaactcacagagttgaacgatggtttacacagagcagatttgaaacactctttttgtggaatttgcaagtggagatttcagccgctttgaggtcaatggtagaaaaggaaatatcttcctataaaaactagacagaacgattctcagaaattcctttgtgatgtgtgcgttcaactcacagagtttaacctttcttttcatagagcagttaggaaacactctgtttgtaaagtctgcaagtggatattcagacctctttgaggccttcgttggaaacgggatttcttcctattctgctagacagaagaattcccagtaacttccatgtgttgtgtgtgttcaactcacagagttgaacgttcccttagacagagcagatttgaaacactctttttgtagaatttgcaagtggagatttcaagcgctttgaggccaaaggcagaaaaggaaatatcttcgtataaaaactagacagaatcattctcagaaactgctctgcgatgtgtgcgttcaactctcagagtttaacttttcttttcattcagcagtttggaaacactctgtttgtaaagtctgcacggggatattttgaccacttagaggccttcgttggaaacgggtttttttcctgtaaggctagacagaagaattcccagtaacttccttgtgttgtgtgcattcaactcacagagttgaacgttcccttagacagagcagatttgaaacactctatttgtccaatttgcaagtgtagatttcaagcgctttaaggtcaacggcagaaaaggaaatatcttcgtttcaaaactagacagaatgattctcagaaactcctttgtgatgtgtgcgttcaactcacagagtttaacctttcttttcatagagcagttaggaaacactctctttgtaaagtctgcaagtggatattcagacctctttgaggcctttgttggaaacgggatttcttcatattatgctagacagaagaattctcagtaacttccttgtgttgtgtgtattcaactcacagagttgaacgatcctttacacagagcagacttgaaacactctttttgtggaaattgcaagtggagatttcagccgctttgaagtcaatggtagaaaaggaaatatcttcgtataaaaactagacagaatgattctcagaaacttctttgtgatgtgtgcgttcaactcacagagtttaacctttcttttcatagagcagttaggaaacactctgtttgtaaactctgcaagtggatatacagacctctttgaggccttcgttggaaacgggatttcttcatactatgctagacagaagaattctcagtaacttccttgtgttgtgtgtattcaactgacagagttgaactttcatttagagagagcagatttgaaacactgtttttgtggaatttgcaagtggtgacttcaagcgctttggggccaaaggcagaaaaggaaatatcttcgtataaaaactagacagaatcattctcagaaactgctctgcgatgtgtgcgttcaactctcagagtttaacttttcttttcattcagcagtttggaaacactctgtttgtaaagtctgcacgtggataatttgaccacttagaggccttcgttggaaacaggtttttttcatgtaaggctagacagaagaattcccagtaacttccttgtgttgtgtgcattcaactcacagagttgaacgttcccttagacagagcagatttgaaacactctatttgtgcaatatgcaactgtagatttcaagcgctttaaggtcaatggcagaaaaggaaatatcttcgtttcaaaactagacagaatcattcccacaaactgcgttgtgatgtgttcgttcaactcacagagtttaacctttctgttcatagagcagttaggaaacactctgtttgtaaagtctgtaagtggatattctgacatcttgtggcattcgttggaaacgggatttcttcatattctgctagacagaagaattctcagtaacttccttgtgttgtgtgtattcaactcacagaattgaacgatcctttacacagagcagacttgaaacacactttttgtggaatttgcaagtggagatttcagccgctttgaggtcaatggtagaaaaggaaatatcttcgtatagaaacaagacagaatgattctcagaaactcctttgtgatgtgggtgttcaactcacagggtttaactttcttttcatagagcagttaggaaacacactgtttctaaagtctgcaagtggatattttcacctctttgaggccttcgttgcaaacggcttttttttcatgtaaggctagacagaagaattctcagtaacttccttttgttgtgtgtattcaactgacagagttgaactttcatttagacagagcagatttgaaacactctttttctggaatttgcaagtggagatttcaagcgctttgaggccaaaggcagaaaaggatatattttcgtataaaaactagacagaatcattctcagaaactgctctgcgatgtatgcgttcaactctcagagtttaacttttcttttcattcagcagtttggaaacactctgtttgtaaagtctgcacgtggatattttgaccacttagaggccttcgttggaaacgggtttttttcatgtaaggctagacagaagcattcccagtaacttccttgtgttgtgtgcattcaactcacagagatgaacgttcccttagacagagcagatttgaaacactctatttgtgcaatttgcaagtgtagatttcaagcgctttaaggtcaatggcagaaaaggaaatatcttcgtttcaaaactagacagaatgattctcagaaacttctttgtgatgtgtgcgttcaactcacagagtttaacctttcttttcatagagcagttaggaaacactctgtttgtaaattctgtaagtggatattctgaaatcttgtggccttcgttggaaacgggatttcttcatattctgctagacagaagaattctcagtaacttccttgtgttgtgtgtattcaactcacagagttcaacgatcctttacacagagcagacttgtaacactctttttgtggaatttgcaagtggagatttcagccgctttgaagtcaaaggtagaaaaggaaatatcttcctataaaaactagacagaaagattctcagaaactcctttgtgatgtgtgcgttcaactcacagagtttaacctttcttttcatagagcagttaggaaacactctgtttgtaaagtctgcaagtggatattcagacctctttgaggccttcgttggaaacgggatttcttcatactgtgctagacagaagaattctcagtaacttccttgtgttgtgtgtattcaactgacagagttgaactttcatttagagagagcagatttgaaacactgtttttgtggaatttgcaagtggagatttcaagcgctttggggccaaaagcagaaaaggaaatatcttcgtagaaaaactagacagaatcattctcagaaactgctctgcgatgtgtgcgttcaactctcagagtttaacttttcttttcattcagcagtttggaaacactctgtttgtaaagtctgcacgtggatattttgaccacttagacgccttcgttggaaacgggtttttttccagtaaggctagacagaagaattcccagtaacttccttgtgttgtgtgcattcaactcacagagttgaacgttcccttagacagagcagatttgaaacactctatttgtgcaatttgcaagtgtagatttcaagcgctttaaggtcaatggtagaaaaggaaatatcttcgttttaaaactagacagaatcattcccacaaactgcgttgtgatgtgctcgttcaactcacagagtttaacctttctgttcatagagcagttaggaaacactctgtttgtaaagtctgcaagtggatattcagacctctttgaggccttcgttggaaaagggatttcttcatattctgctagacagaagaattctcagtaacttccttgtgttgtgtgtatacaactcacagagttgaacgatcctttacacagagcagacttgagacactctttttgtggaatttgcaagtggagatttcagccgctttgagttcaatggtagaataggaaatatcttcctatagaaactagacagaatgattctcagaaactcctttgtgatgtgtgcgttcaactcacagagtttaacttttcttttcatagagcagttagggaacactctgtttgtaaagtctgcaagtggatattcagacctctttgaggccttcgttggaaacgggatttcttcatattctgctagacagaagaattctcagaaacttccttgtgttgtgtgttttcaactcacagagttgaacgatcctttacacagagcagacttgaaacactccttttgaggaatttgcaagtggagatttcagccgctttgaggtcaatggtagaataggaaatatcttcctatagaaactagacagaatgattctcagaaactcctttgtgatgtgtgcgttcaactcacagagtttaacctttcttttcatagagcagttaggaaacactctgtttgtaaagtctgcaagtggatattcagacctgtttgaggccttcgttggaaacgggtttctttcatataaggctagacagaagaattctcaagtaacttccttgtgttgtgtttattcaactcacagagttgaatgatcctttacacagagcagacttgaaacactctttttgtggaaattgcaaatggagatttcagccgctttgaggtcaatggtagaaaagtaaatatcttcgtataaagactagacagaatgattctcagaaactcctttttgatgtgtgcgttcaactcacagagtttaacctttctgttcatagagcagttaggaaacactctgtttgtaaagtctgcaagtggatattcagacctcctagaggccttcgttgaaaacgggatttcttcatattctgctagacagaagaattcccagtaacttccttgtgttgtgtacattcaactcacagaggtgaacgttcccttagacagagcagatttgaaacactctttttgtgcaattggcaagtggagatttcaagcgctttgaggtcaatggcagaaaaggaaatatcttcctttcaaaactagacagaatcattctcagaaactgctctgcgatgtgtgcgttcaactctgagagtttaacttttcttttcattcagcagtttggaaacactctgtttgtaaagtctgcacgtggataatttgaccacttagaggccttcgttggaaacgggtttttttcatgtaaggctagacagaagaattctcagtaacttccttgtgttgtgtgtattcaactcacagagttgaacgatcctttacacagagcagacttgtaacactctttttgtggaatttgcaagtggagatttctgccgctttgaagtcaaaggtagaaaaggaaatatcttcctataaaaactagacagaatgattctcagaaacttctttgtgatgtgtgcgatcaactcacagagtttaacctttcttttcatagagcagttaggaaacactctgtttgtaaactctgcaagtggatgttcagacctgtttgaggccttcgttggaaacgggatttcttcatactatgctagacagaagaattctcaagtaacttccttgtgttgtgtgtattcaactgacagagttgaactttcatttagagagagcagatttgaaactctgtttttgtggaatttgcaagtggagatttcaagcgctttggggccaaaggcagaaaaggaaatatcttcgtataaaaactagacagaatgattctcagaaactcctttgtgatgtgtgcgttcaactctcagagtttaacttttcttttcattcagcagtttggaaacactctgtttgtaaagtctgcacgtggatattttgaccacttagaggccttcgttggaaacgggtttttttcctgtaaggctagacagaagaattctcagtaacttccttttgttgtgtgtattcaactcacagagttgaacgatcgtttacacagaacagattagaaacactctttttgtggaatttgcaagtggagatttcagccgctttgaggtcaatggtagaataggaaatatcttcctatagaaactagacagactgattctcagaaactcctttgtgatgtgtgcgttcaactcacagagtttaacctttcttttcatagagcagttaggaaacactctgtttgtaaagtctgcaagtggatattcagacatctttgaggctttcgttggaaacggggtttcttcatattctgctatagagaagaattctcagaaacttccttgtgttgtgtgttttcaactcacagagttgaacgatgctttacacagagtagacttgaaacactctttttgtggaatttgcaagtggagatttcagccgctttgacgtcaatggtagaaaaggaaatatcttcgtataaaaactagacagaatgattctcagaaactcctttgtgatgtgtgcgttcaacttacagagtttaacctttcttttcatagagcagttaggaaacactctgtttgtaaagtctgcaagtggatattcagacctctttgaggccttcgttggaaacgggatttcttcatactatgctagacagaagaattcccagtaacttccttgtgtgtgtgtgttcaactcacagagttgaactttcatttacacagagcagatttgaaacactctttttgtggaatttgcaaatggggatttcaagcgctttgaggccaaaggcagaaaaggaaatatcttcgtataaaaactagacagaatcattctcagaaactgctctgcgatgtgtgcgttcaactctcagagtttaacttttcttttcattcagcagtttggaaacactctgtaaagtctgcacgtggatattttgaccacttagaggccttcgttggaaacgggtttttttcctgtaaggctagacagaagaattcccagtaacttccttgtgttgtgtgcattcaactcacagagttgaacgttcccttagacagagcagatttgaaacactctatttgtgcaatttgcaagtgtagttttcaagctctttaaggtcaacggcagaaaaggaaatatcttcgtttcaaaactagacagaatcattcccacaaactacgttgtgaggtgttcagtaaactcacagagtttaacctctcttttcatagagcagttgggaaacagtctgtttgtaaattctgtaagtggatattctgacaacttgtggccttcgttggaaacgggatttcttcatattctgctagacagaagaattctcagtaaattccttgtgttgtgtgtattcatctcacagagttgaacgatcctttacacagagcagacttgaaacactctttttgtggaatttgcaagtggagatttcagccgctttgaggtcaatggtagaaaaggaaatatcttcgtataaaaactagacagaatgattctcagaaacacctttgtgatgtgtgcgttcaactcacagagtttaacctttcttttcatagagcagttaggaaacactctgtttgtgaagtctgtaagtggatattcagacctccttgaggccttcgttggaaacgggatttcttcatattatgctagacagaagaattctcagtaacttccttgtgttgtgtgtattcaagtgacagagttgaactttcatttagagagagcagatttgaaacactgtttttgtggaatttgcaagtggagatttccagcgctttggggccaaaggcagaaaaggaaatatcttcgtataaaaactagacagaatcattctcagaaactgctgtgcgatgtgtgcgttcaactctcagagtttaacttttcttttcattcagcagtttggaaacactctgtttgtaaagtctgcacgtggatattttgaccacttagaggccttcgttggaaacaggtttttttcctgtaaggctagacagaagaattcccggtaacttccttgtgttgtgtacattcaactcacagagttgaacgttcccttagacagagcagatttgaaacactctttttgtgcaattggcaaatggagatttcaagcgctttaaggtcaatggcagaaaaagaaatatcttcgtttcaaaactagacagaatcattcccacaaactgcgttgtgatgtgttcgttcaactcacagagtttaacctttcttttcatagagcagttaggaaacagtctgtttgtcaattctgtaagtggatattctgacgtcttgtggccttcgttggaaacgggttttcttcatattctgctagacagaagaattctcagtaacttccttgtgttgtgtgtattcaactcacagagttgaacgatcctttacacagagcagacttgaaacactctttttgtggaatttgcaagtggagatttcagccgctttgaggttaatggtagaaaatgaaatatcttcgtatagaaactagacagaaatgattctcagaaactcctttgtgatgtgtgtgttcaactcacagagtttaacctttcttttcatagaacagttaggaaacactctgtttgtaaagtctgcaagtggatattcagaactctttggggccttcgttggaaacgggtttttttcatataaggctagacagaagaattcccaagtaacttccttgtgttgtgtgtgttcaactcacagagttgaactttcatttacacagagcagatttgaaacactctttttgtggaatttgcaagtggagatttcaagcgctgtgaggccaaaggcagaaaaggaaatatcttcgtataaaaactagacagaatcattctcagaaactgctctgcgatgtgtgcgttcaactctgagagtttaacttttcttttcattcagcagtttggaaacactctgtttgtaaagtctgcacgtggatattttgaccacttagaggccttcgttggaaacgggtttttttcctgtaaggctagacagaagaattcccagtaacttccttctgttgtgtacattcaactcacagagttgaacgttcccttagacagagcagatttgaaacactctttttgtgcaattggcaaatggagatttcaagcgctttaaggtcaatggcagaaaaggaaatatcttcgtttcaaaactagacagaatcattcccacaaactgcgttgtgatgtgttcgttcaactcacagagtttaacctttcttttcatagagcagttaggaaacactctgttgctaaattctgtaagtggatattctgacatcttgtggccttcgttggaaacgggatttcttcatattctgctagacagaggaattctcagtaacttccttgtgttgtgtgtattcaactcacagagttgaacgatcctttacacagagcagacttgaaacactctttttgtggaatttgcaagtggagatttcagccgctttgagttcaatggtagaataggaaatatcttcctatagaaactacacagaatgattctcagaaactcgtttgtgatgtgcgcgttcaactcacagagttcaacctttcttttcatagagcagttgggaaacactctgtttgtaaagtctgcaagtggatattcagacttctttgaggccttcgttggaagcgggatttcttcatattctgctagacagaagaattcccagtaacttccttgtgttgtgtgtgttcaactcacagagttgaactttcatttacacagagcagatttgaaacactctttttgtggaatttgcaagtggagatttcaagcgctttgaggacaaaggcagaaaaggaaatatcttcgtataaaaactagacagaatcattctcagaaactgctgcgtgatgtgtgctttcaactctcagagtttaacttttcttttcattcagcggtttggaaacactctgtttgtaaagtctgcacgtggaaattttgaccacttagaggccttcgttggaaacgggtttttttcatgtaaggctagacagaagaattcccagtaacttccttctgttgtgtacattcaactcacagagttgaacgttcccttagacagagcagatttgaaacactctttttgtgcaattggcaagtggtgatttcagccgctttgaggtcaatggtagaaaaggaaatatcttcgtataaaaactagacagaatcattcccacaaactgcattgtgatgtgttcgttcaactcacagagtttaacctttccgttcatagagcagtcaggaaacacactgtttgtaaagtctctaagtggatattctgacatcttgtggccttcgttggaaacgggatttcttcatattctgctagacagaagaattctcagtaacttccttgtgttgtgtgtattcaactcacagagttgaacgatcctttacacagagcagacttgaaacactctttttgtggaatttgcaagtggagatttcagcagctttgaggtcaatggtagaaaaggaaatatcttcgtataaagactagacagaatgattctcagaaactcctttgtgatgtgtgtgttcaactcacagagtttaacttttcttttcatagagcagttaggaaacactctgtttgtaaagtctgcaagtggatattcagacctctttgaggccttcgttggaaacgggatttcttcatattatgctagacagaagaattctcagtaacttccttgtgttgtgtgtattcaactgacagagttgaactttcatttagagagagcagatttgaaacactgtttttgtggagtttgcaagtggagatttcaagcgcttttgggccaaaggcagaaaaggaaatatcttcgtataaaaactagacagaatcattctcagaaactgctgcgtgatgtgtgcgttcaactctcagagtttaacttttcttttcattcagcagtttggaaacactctgtttgtaaagtctgcacgtggaaattttgaccacttagaggccttcgttggaaacgggtttttttcatgtaaggctagacagaagaattcccagtaacttccttgtgttgtgtgcattcaactcacagagttgaacgttcccttagacagagcagatttgaaacactctatttgtgcaatttgcaagtgtagttttcaagctctttaaggtcaacggcagaaaaggaaatatcttcgtttcaaaactagacagaatcattcccacaaactgcgttgtgaagtgctcgttcaactcacagattttaaactttctgttcatagagcagttaggaaacactctgtttgtaaagtctgtaagtggatattctgacatcttgtggccttcgttggaaacggaatttcttcatattctgctagacagaagaattctcagtaacttccttgtgttgtgtgtattcaactcacagagttgaacgatcctttacacagaggagacttgaaacactccttttgtggaatttgcaagtggagatttcagccgctttgaggtcaatggtagaataggaaatatcttcctatagaaactagacagaatgattctgagaaatcctttgtgatgtgtgcgttcaactcacagagtttaacctttcttttcatagagcagttaggaaacactctgtttgtaaagtctgcaagtggatattcagacctccttgaggccttcgttggaaacgggatttcttcatattatgctagaaagaagaattcccagtaacttccttgtgttgtgtgtgttcaactcacagagttgaactttcatttacacagagcagattggaaacactctttttgtggaatttgcaagtggagatttcatgcgctttgaggccaaaggcagaaaaggaaatatcttcgtataaaaactagacagaatcattctcagaaactgctctgcgatgtgtgcgttcaactctcaagagtttaacttttcttttcattcagcagtttggaaacactctgtttgtaaagtctgcacgtggataacttgaccacttagaggacttcgttggaaacgggtttttttcctgtaaggctagacagaagaattcccagtaacttccttgtgttgtgtacattcaactcacagagttgaacgttcccttagacagagcagatttgaaacactctttttgtgcaattggcaaatggagatttcaagcgctttaaggtcaatggcaggaaaggaaatatcttcgtttcaaaactagacagaataattcccacaaactgcgttgtgatgtgttcgttcaactcacagagtttaacctttcttttcatagagcacttaggaaacagtctgtttgtaaattctgtaagtggatattctgacatcttgtggccttcgttggaaacgggatttcttcatattctgctagacagaagaattctcagaaacttccttgtgttgtgtgttttcaactcacagagttgaacgatgctttacacagagtagacttgaaacactctttttgtgtaatttgcaagtggagatttcagccgccttgaggtcaatggtagaaaaggaaatatcttcgtataaaaactagacagaaatgattctcagaaactcctttgagatgtgtgtgttcaactcacagagtttaacctttcttttcatagagcagttaggaatcactctgtttgtaaagtctgcaggtggatattcagacctctttgaggccttcgttggaaacgggtttttttcatataaggctagagagaagaattctcagtaacttccttgtgttgtgtgtattcaactgacagaattgaactttcatttagagagagcagatttgaaacactgtttttgtggaatttgcaattggagatttcaagcgctttggggccaaaggcagaaaaggaaatatcttcgtataaaaagtagacagaatcattctcagaaactgctgcgtgatgtgtgcgttcaactctcagagtttaacttttctttccattcagcggtttggaaacactctgtttgtaaagtctgcacgtggatattttgaccacttagaggccttcgttggaaacgggtttttttcatgtaaggctagacagaagaattcccagtaacttccttgtgttgtgtacattccactcacagagttgaacgttcccttagacagagcagatttgaaacactctttttgtgcaattggcaagtggagatttcaagcgctttaaggtcaatggcagaaaaggaaatatcttcgtttcaaaactagacagaatcattcccacaaactgcgttgtgatgtgttcgttcaactcacagagtttaacctttctgttcatagagctgttaggaaacactctgtttgtaaagtctgtaagtggatattctgacatcttgtggccttcgttggaaacgggatttcttcatattctgctagacagaataattctcagtaacttccttgtgttgtgtgtattcaactcacagagttgaaggatcctttacagagagcaggcttgaaacactctttttgtcgaatttgcaagtggagatttcagccgctttgaggtcaatggtagaataggaaatatcttcttatacaaactagacagaatgattctcagaaactcctttgtgatgtgtgtgttcaactcacagagtttaacctttcttttcatagagcagttaggaaacactctgtttctaaagtctgcaagtggatattcagacctctttgaggccttcgttggaaacgggtttttttcatataaggctagacagaagaattcccagtaacttccatgtgttgtgtgtgttcaactcacagagttgaactttcatttacacagagtagatttgaaacactctttttgtggaatttgcaaatggagatttcaaactctttgaggccaaaggcagaaaaggaaatatcttcgtataaaaactagacagaatcattctcagaaactgctctgcgatgtgtgcgttcaactctcagagtttaacttttcttttcattcagcagtttggaaacactctggttgtaaagtctgcacgtggatattttgaccacttagaggccttcgttggaaacgggtttttttcctgtaaggctagacagaagaattcccagtaacttccttgtgttgtgtgcattcaactcacagagttgaacattcccttagacagagcagatttgaaacactctatttgtgcaatttgcaagtgtagatttcaagcgctttaaggtcaatggcagaaaaggaaatatcttcgtttcaaaactagacagaatcattcccacaaactgcgttgtgatgtgttcgttcaagtcacagagtttaacttttctgttcatagagcagttagaaaacactctgtttgtaaagtctgcaagtggatattcagacctccttgaggccttcgttggaaacgggatttcttcatattctgctagacagaaagaattctcagtaacttccttgtgttgtgtgtattcaactcacagagttgaacgatcctttacacagagcagacttgtaacactctttttgtggaatttgcaagtggagatttcagccgctttgaagtcaaaggtagaaaaggaaatatcttcctataaaaactagacagaatgattctcagaaactcctttgtgatgtgtgcgttcaactcacagagtttaacctttcttttcatagagcagttaggaaacactctgcttgtaaagtctgcaagtggatattcagccctctttgaggccttcgttggaaacgggttttttttatataaggctagacagaagaattctcagtaacttccttgtgttgtgtttattcaactcacagagttgaatgatcctttacacagagcagaattgaaacactctttttgtggaatttgcaagtggagatttcagccgctttgaggtcaacggtagaaaagtaaatatcttcgtataaagactagacagaatcattctcagaaactgctctgcgatgtgtgcgttcaactctcagagtttaacttttcttttcattcagcagtttggaaacactctgtttgtaaagtctgcacgtggataatttgaccacttagaggccttcattggaaacgggtttttttcctgtaaggttagacagaagaattcccagtaacttccttgtgttgtgtacattcaactcacagagttgaacgttcccttagacagagcagatttgaaacactctttttgtgcaattggcaaggggagatttcaagcgctttaaggtcaatggcagaaaaggaaatatcttcgtttcaaaactagacagaatcattcccaaaaactgcgttgtgatgtgttcgttcaactcacagagtttaacctttcttatcatagagcagttgggaaacagtctgtttgtaaattctgtaagtggatattctgacatcttgtggtcttcgttggaaacgggatttcttcatattctgctagacagaataattctcagtaacttccttgtgttgtgtgtattcaactcacagagttgaacgatcctttacagagatcaggattgaaacactctttttgtcgaatttgcaagtggagatttcagccgctttgaggtcaatggtagaataggaaatatcttcttatagaaactagacagaatgattctcagaaactcttttgtgatgtgggtgttcaactcacagagtttaactttcttttcatagagcagttaggaaacactctgtttataaagtctgcaagtggatattttcacctctttgaggccttcgttggaaacgggttttttttcatgtaaggctagacagaagcattctcagaaactgctctgcgatgtgtgcgttcaactctcagagtttaacttttcttttcattcagcagtttggaaacactctgtttgtaaagtctgcacgtggatattttgaccacttagaggccttcgttggaaacgggtttttttcctgtaaggctagacagaagaattcccagtaacttccttgtgttgggtgcattcaactcacagagttgaacgttccttagacacagcagatttgaaacactctatttgtgcaatttgcaagagtagattccaagcgctttaaggtcaatggcagaaaaggaaatatcttcgtttcaaaactagacagaatcattcccacaaactgcgttgtgatgtgttcgttcaactcacagagtttaacctttcttttcatagaccagttaggaaacagtctgtttgtaaattctgtaagtggatattctgacatattgtggccttcgttggaaacgggatttcttcatattctgctagacagaagaattctcagtaacttccttgtgttgtgtgtattcaactcacagagttgaacgatcctttacacagagcagacttgaaacactctttttgcggaatttgcaagtggagatttcagccgctttgaggtcaatggtagaataggaaatatcttcctatagaaactagacagaatgattctcagaaactcctttgtgatgtgtgggttcaactcacagagtttaacctttcttttcatagagcagttaggaaacactctgtttgtaaagtctgcaagtggatattcagacctctttgaggccttcgttggaaacgggattttttcatataaggctagacagaagaattcccagtaacttccttgtgttgtgtgtgttcaactcacagaattgaactttcatttacacagagcagatttgaaacactctttttgtggaatttgcaaatggagatttcaagcgctttgaggccaaaggcagaaaaggaaatgtcttcgtttcaaaactagacagaatgattctcagaaactgctctgcgatgagtgcgttcaactctcagagtttaacttttcttttcattcagcagtttggaaacactctgtttgtaaagtctgcacgtggatattttgaccacttagaggccttcgtcggaaacgggtttttttcatgtaaggctatagagaagaattcccagtaacttccttgtgttgtgtacattcaactcacagagttgaacgttcccttagacagagcagatttgaaacactctttttgtgcaattggcaagtggtgatttcaaccgctttgaggtcaatggtagaaaaggaaatatcttcgtataaaaactagacagaatcattcccacaaactgcgttgtgatggttcgttcaactcacagagtttaacctttcttttcatagagcagttaggaaacagtctgtttgtcaattctgtaagtggatattctgacatcttgtggccttcgttggaaacgggatttcttcatattttcctagacagagtaattctcagtaacttccgtgtgttgagtgtattcaactcagagagttgaacgatcctttacagagagcagacttgaaacactctttttgtggaatttgcaagtggagatttcatccgctttgaggtcaatggtagaaaaggaaatatcttcgtataaagactagacagaatgattctcagaaacttctttgtgatgtgtgcgttcaactcacagagtttaacctttcttttcatagagcagttaggaaacactctgtttgtaaactctgcaagtggatattcaaacctctttgaggccttcgttggaaacgggatttcttcatactgtgctagacagaagaattctcagtaacttccttgtgttgtgtgtattcaactgacagagttgaactttcatttagagagagtagttttgaaacactgtttttgtggaatttgcaagtggagatttcaagcgctttggggccaaaggcagaaaaggaaatatcttcgtataaaaactagacagaatcattctcagaaactgctgcgtgatgtgtgcgttcaacactcagagtttaacttttcttttcattcagcggtttggaaacactctgtttgtaaagtctgaacgtgcatattttgaccacttagaggccttcgttggaaacgggtttttttcatgtaaggctagacagaagaattctcagtaacttccttgtgttgtgtttattcaactcacagagttgaatgatcctttacacagagcagatttgaaacactctatttgtgcaatttgcaagtgtagatttcaagcgctttaaggtcaacggcagaaaaggaaatatcttcgtttcaaaactagacagaatcattcccacaaactacgttgtgatgtgttcgttcaactcacagagtttaacctttcttttcatagagcagttaggaaacagtctgtttgtcaattctgtaagtggatattctgacatcttgtggccttcgttggaaacgggatttcttcatattctgctagacagaagaattctcagtaacttccttgtgttgtgtgtattccactcacagagttgaacgatcctttacacagagcagacttgtaacactctttttgtggaattttcaagtggagatttcagccgctttgaagtcaaagttagaaaaggaaatatcctcctataaaaactagacagaatgattctcagaaactcctttgtgatgtgtgtgttcaactcacagagtttaacgtttcttttcatagagcagttagtaaacactctgtttatgaagtctgcaagtggatattcagacctctttgaggtcttcgttggaaacgggatttcttcatattatgctagacagaagaattctcagaaacttccttgtgttgtgtgttttcaactcacagagtacaacgatcctttacacagagtagacttgaaacactctttttgtggaattggcaagtggagatttcagccgctttgaggtcaatggtagaaaaggcaatatcttcgtataaaaactagacagaatcattctcagaaactgctctgcgatgtgtgcgttcaactctcagtgtttaacttttcttttcattcagcagtttggaaacactctgtttgtaaagtctgcacgtggatattttgaccacttagaggccttcgttggaaacgggtttttttcctgtaaggctagacagaagaattcccagtaacttccttgtgttgtgagcattcaactcacagagttgaacgttcccttagaccgagcagatttgaaacactctatttgtgcaatttgcaagtgtagttttcaagctctttaaggtcaacggcagaaaaggaaatatcttcgtttcaaaactagacagaatgattctcagaaactcctttgtgatgtgtgcgttcaactcacagagtttaacctttcttttcatagagcagttaggaaacagtctgtttgtcaattctgtaagtggatattctgacatcttgtggccttcgttggaaacgggatttcttcatattctgctagacagaagaattctcagtaacttccttgtgttgtgtgtattcaactcacagagttgaacgatcctttacacagagcagacttgaaacactctttttgtggaatttgcaagtggagatttcagccgctttgagttcaatggtagaataggaaatatcttcctatagaaactagagagaatgattctcagaaactcctttgtgatgtgtgtgttcaactcacagagttgaacctttcttttcatagagcagtaagtaaacactctgtttataaagtctgcaagtggatattcagacccctttgaggccttcgttggaaacgggatttcttcatattatgctagacagaagaattctcagtaacttccttgtgttgtgtgtattcaactgacagagttgaactttcatttagacagagcagatttgaaacactctttttgtggaatttgcaagtggagatttcaagcgctttgaggccaaagtcagaaaaggaaatatcttcgtataaaaactagacagaatcattctcagaaactgctctgcgatgtgtgcgttcaactctcacagtttaacttttcttttcattcagcagtttggaaacactctgtttgtaaagtctgcacgtggataatttgaccacttagaggccttctttggaaacgggtttttttcatataaggctagacagaagaattcccagtaacttccttgtgttgtgtacattcaactcacagagttgaacgttcccttagacagagcagatttgaaacactctttttgtgcaattggcaaatggagatttcaagcgctataagttcaatggcagaaaaggaaatatcttcgtttcaaaactagacagaatgattctcacaaactcctttgtgatgtgtgcgttcaactcacagagtttaacctttcttttcatagagtagttaggaaacactctgtttgtaaagtctgcaagtggatattcagacctgtttgaggccttcgttggaaacgggatttcttcatactgtgctagacagaagaattctcagaaacttccttgtgttgtgtgtattcaactcacagagttgaacgacgctttacacagagcagacttgaaacactctttttgtggaatttgcaagtggggatttcagccgctttgaggtcaatggtagaatagggaatatcttcctatagaaactagacagaatgattctcagaaactcctttgtgatgtgtgcgttcaactcacagagtttaacttttcttttcatagagcagttaggaaacactctgtttgtaaagtctgcaagtggatattcagacctctttgaggccttcgttggaaacgggatttcttcattttctgctagacagaagaattctcagtaacttccttgtgttgtgtgtattcaactgacagagttgaactttcatttagagagagcagatttgaaacactgtttttgtggaatttgccagtggagatttcaagcgctttggggccaaaggcagaaaaggaaatatcttcgtataaaaactagacagaatcattctcagaaactgctgcgtgatgtgtgcgttcaactctcagagtttaactttccttttcattcagcggtttggaaacactctgtttgtaaagtctgcacgtggatattttgaccacttagaggccttcgttggaaacgggtttttttcatgtaaggctagacagaagaattcccagtaacttccttgtgttgtgtacattcaactcacagatttgaacgttcccttagacagagcagatttgaaacactctttttgtgcaattggcaaatggagatttcaagcgctttaaggtcaatggcagaaaagggaatatcttcgtttcaaaactagacagaatgattgtcataaactcctttgtgatgtgtgcgttcaacacacagagtttaacctttctgttcatagagcagttaggaaacattctgtttgtaaagtctgtaagtggatattctgacatcttgtggccttcgttggaaacgggatttcttcatattctgttagacagaagaattctcagaatcttccttctgttgtgtgtattcaactcagagagttgaatgatcctttacacagagcagacttgaaccactctttttgtggaatttgcaagtggagattacagccgctttgaggtccatggtagaaaaggaaatatcttcgtataaaaactagacagaatgattctcagaaacttctttgtgatgtgtgcgttcaactcacagagtttaacctttcttttcatagagcagttgggaaacactctgtttttaaagtctgcaagtggatattcagacctactttgaggccttcgttggaaacgggtttttttcatgtaaggctagacagaagaattcccagtaacttccttgtgttgtgtgtgttcaactcacaggagttgaactttcatttacacagagcagatttgaaacactctttttgtggaatttgcaagtggagatttcaagcgctttgaggccaaaggcagaaaaggaaatatcttcgtttcaaaactagacagaatgattctcagaaactgctctgcgatgtgtgcgttcacctctcagagtttaacttttcttttcattcagcagtttggaaacactctgtttgtaaagtctgcacgtgcataatttgaccacttagaggccttcgttggaaacgggtttttttcatgtaaggctagacagaagaattcccagtaacttccttgtgttgtgtgcattcaactcacagagatgaacgttcccttagacagagcagatttgaaacactctatttgtgtaatttgcaagtgtagatttcaagcgctttaaggtcaatggcagaaaaggatatatctccgtttcaaaactagacagaatcattcccacaaactgcgttgtgatgtgttcgttcaactcacagagtttaacctttctgttcttagagcagttaggaaacactctgtttgtaaagtctgtaagtggatattctgacatcttgtggccttcgttggaaacgggatttctttatattctgctagacagaagaattctcagcaacttccttgtgttgtgtgtattcaactcacagagttgaacgatcctttacacagagcagacttgaaacactctttttgtggaatttgcaagtggagatttcagccgctttgaggtcaatggtagaataggaaatatcttcctatagaaactagacagaatgattctcagaaactcctttgtgatgtgggcgttcgaactcacagagtttaacctttcttttcatagagcagttaggaaacactctgtttgtaaagtctgcaagtggatattcagacatctttgaggctttcgttggaaactggatttcttcatattctgctatacagaagaattcccagtaacttccttgtcttgtgtgtgttcaactcccagagttgaactttcatttacacagagcagatttgaaacactctttttgtggaatttgcaagtggagatttcaagcgctttgaggccaaaggcagaaaaggaaatatcttcgtttcaaaactagacagaatcattctcagaaactgctgcgtgatgtgtgcgttcaactctcagagtttaacttttcttttcattcagcggtttggaaacactctgtttttaaagtctgcacgtggatattttgaccacttagaggccttcgttggaaacgggttttttttcatgtaaggctagacagaagaattctcagtaacttccttgtgttgtgtgtattcaactcacacagttgaacgatcctttacacagagcagacttgtaacactctttttgtgggatttgcaagtggagatttcagccgctttgaagtcaaaggtagaaaaggaaatatcttcctataaaaactagacagaatcattcccacaaactgcgttgtgatgtgttcgttcaactcacagagtttaacctttctgttcatagagcagttaggaaacactctgtttgtaaagtctgcaagtggatattcagacctctttgaagccttcgatggaaacgggatttcttcatattctgctagacagaagaattctcagtaacttcgtggtgttgtgtgttttcaactcacagagttgaatgatcctttacacagaacagtcttgaaacactctttttgtggaatttgcaagtggagatttcagccgctttgaggtcaatggtagaataggaaatatcttcctatagaaactagacagaatgattctcagaaactcctttgtgatgtgtgcgttcaactcacagagtttaacctttcttttcatagagcagttaggaaacactctgtttgtaaagtctgcaagtggatattcagacctctttgaagccttcgttggaaacgggatttcttcatattctgctagacagaagaattctcagtaacttccttgtgttgtgtgtattcaactcacagagttgaacgaacctttacacagagcagacttgaaacactctttttgtggaatttgcaagtggagatttcagccgctttgaggtcaattgtagaaaaggaaatatcttcgtagaaaaactagacagaatcattctcagaaactgctctgcgatgtgtgcgttcaactctcagagtttaacttttcttttcattcagcagtttggaaacactctgtttgtaaagtctgcacgtggataatttgaccacttagaggacttcgttggaaacgggtttttttcatgtaaggctagacagaagaattctcagtaacttccttgtgttgtgtgtattcaactcacagagttgaacgttcccttagacagagcagatttgaaacactctttttgtgcaattggcaagtggagatttcaagcgctttaaggtcaatggcagaaaaggaaatatcttcgtttcaaaactagacagaatgattctcagaaacttctttgtgatgtgtgcgttcaactcacagagtttaacctttcttttcatagagcagttaggaaacactctgtttgaaaactctgcaagtggatgttcagacctctttgaggccttcgttggaaacgggatttcttcatactatgctagacagaagaattctcagtaacttccttgtgttgtgtgtattcaactcacagagttgaacgatcctttacacagagcagacttgtaacactctttttgtggaatttgcaagtggagatttcagccgctttgacgtcaaaggtagaaaaggaaatatcttcctataaaaactagacagaatgattctcagaaactcctttgtgatgtgtgtgttcaactcacagagtttaacctttcttttcatagagcagttagtaaacactctgtttataaagtctgcaagtggatattcagacccctttgaggccttcgttggaaacgggttttcttcatattctgctagacagaagaattctcagtaacttcccttgtgttgtgtgtattcaactcacagaattgaatgatcctttacacagagcggacttgaaacactctttttgtggaatttgcaagtggagatttcagccgttttgagttcaatggtagaataggaaatatcttcctatagaaactagacagaatcattctcagaaactgctctgcgatgtgtgcgttcaactctcagagtttaacttttcttttcattcagcagtttggaaacactctgtttgtaaagtctgcacgtggatattttgaccatttagaggccttcgttggaaacgggtttttttcttgtaaggctagacagaagaattcccagtaacttccttgtgttgtgtacattcaactcacagagttgaacgttcccttagacagagcagatttgaaacactctttttgtgcaattggcaagtggtgatttcagcctctttgaggtcaatggtagaaaaggaaatatcttcgtataaaaactagacagaacgattctcagaaactcctttgtgatgtgtgcgttcaactcacagagtttaacttttcttctcatagagcagttaggaaacactctgtttgtaaagtctgcaagtggatattcagacctctttgaggccttcgttggaaacgggatttcttcatattttgctagacagaagaattctcagtaacttccttgtgttgtgtgtattcaactcacagagttgaacgatctcttacacagagcagagttgaaacactctttttctggaatttgcaagtggagatttcagccgctttgaggtcaatggtagaataggaaatatcttcctatagaaactagacagaatgattctcagaaactcctttgtgatgtgtgcgttcaactcacagagtttaacctttcttttcatagagcagttaggaaacactctgtttgtaaagtctgcaagtggatactcagacctctttgaggccttcgttggaaacgggtttttttcatataaggctagacagaagaattcccagtaacttccttgtgttgtgtgtgttcaactcacagagttgaactttcatttacacagagcagatttgaaacactctttttgtggaatttgcaaatggagatttcaagcgctttgaggccaaaggcagaaaaggaaatgtcttcgtttcaaaagtagacagaatcattctcagaaactgctctgcattgtgtgtgttcaactctcagagtttaacttttcttttcattcagcagtttgaaaacactctgtttgtaaagtctgtacgtggataatttgaccacatagaggccttcgttggaaacgggtttttttcatgtaaggctagacagaagaattctcagtaacttccttgtgttgtgtgtattcaactcacagagttgaacgatcctttacacagagcagacttgtaacactctttttgtggaatttgcaagtggagatttcagccgctgtgaagtcagaggtagaaaaggaaatatcttcctataaaaactagacagaatcattcccacaaactgcgttgtgatgtgttcgttcaactcacagagtttaacctttccgttcatagagcagttaggaaacactctgtttgtaaagtctgtaagtggatattgtgacatcttgtggccttcgttggaaacgggatttcttcatattctgctagacagaagaattctcagtaactgccttgtgttgtgtgtattcaactcacagagttgaacgatcctttacacagagcagacttgaaacactccttttgtggaatttgcaagtggagatttcagccgctttgaggtcaatggtagaataggaaatatcttcttatagaaactagacagaatgattctcagaaactcctttgtgatgtgtgcattcaactcacagagtttaacctttcttttcatagagtagttaggaaacactctgtttgtaaagtctgcaagtggatattcagacctccttgaggccttcgttggaaacgggatttcttcatattatgctagacagaagaattctcagtaacttccttgtgttgtgtgtattcaactgacagagttgaactttcatttagacagagcagatctgaaacactctttttgtggaatttgcaagtggagatttcaagcgctttgaggccaaaggccgaaaaggaaatatcttcgtataaaaactagacagaatcattctcagtaactgctctgcgatgtgtgcgttcaactctcagagtttaacttttcttttcattcagcagtttggaaacactctgtttgtaaagtctgcacgtggatattttgaccacttagaggccttcgttggaatcgggtttttttcctgtaaggctagacagaagaattcccagtaacttacttgtgttgtgtacattcaactcacagagttgaacgttcccttagacagagcagatttgaaacactctttttgtgcaattggcaagtggtgatttcagctgctttgaggtctatggtagaaaagggaatatcttcgtataaaaactagacagaatgattctcagaaactcctttgtgatgtgtgcgttcaactcacacagtttaacctttcttttcatagagcagttagaaaacactctgtttgtaaagtctgcaagtggatattcagacctccttgaggcattcgttggaaacgggatttcttcatattatgctagacagaagaattctcagtaacttccttgtgttgtgtgtattcaactcacagagttgaacgatcctttacacagagcagacttgaaacactctttttgtggaatttgcaagtggagatttcagccgctttgaggtcaatgttagaataggaaatatcttcctatagaaactagacagagtgattctcagaaactcctttgtgatgtgtgcgttcaactcacagagtttaacctttcttttcatagagcagttaggaaacactctgtttgtaaagtctgcaagtggatattcagagctccttgaggccttcgttggaaacgggatttcttcatattctgctatacagaataattctcagtaacttccttgtgttgtgtgtattcaactcacagagttgaacaatcctttacacagagcagacttgaaacattctttttgtggaatttgcaagtggagatttcagccgctttgaggtcaatggtagaataggaaatatcttcctatagaaactagacagaatcattctcagaaactgctctgtgatgtgtgcgttcaactcacagagtttaacttttcttttcattcagcagtttggaagcactctgtttgtatagtctgcaagtggatatattgaccactttgaggccttcgttggaaacggttttttttcatgtaaggctagacagaagaattcccagtaacttccttgtgttgtgtacattcaactcacagagttgaacgttcccttagagagagcagatttgaaatactctttttgtgcaattggcaagtggagatttcaagcgctttaaggtcaatggcagaaaaggaaatatcttcgtttcaaaactagacagaatcattcccacaaactgcgttgtgatgtgttcgttcaactcacagagtttaacctttcttttcatagagcagttaggaaacactctgttggtaaattctgtaagtggatattctgacattttgtggccttcgttggaaacgggatttcttcatattctgctagacagaagaatgctcagtaacttccttgtgttgtgtgtattcaactcacagagttgaacgatcctttacacagagcagacttgaaacactctttttgtggaatttgcaagtggagatttcagccgctttgaggtcaatggtagaaaaggaaactatcttcatataaagattagacagaatgattctcagaaactcctttgtgatgtgtgtgttcaactcacagagtttaacctttcttttcatagagcagttaggaaacactctgtttgtaaagtctgcaagtggatattctgacctctttgaggccttcgttggaaacgggtttttttcatataaggctagacagaagaattctcagtaacttccttgtgttgtgtgtattcaaatgacagagttgaatttcatttagagagagcagatttgaaacactgtttttgtggaatttgcaagtggagatttcaagcgctttggggccaaaggcagaaaaggaaatatcttcgtataaaaactagacagaatcattctcagaaactgctgcgtaatgtgtgcgttcaactctcagagtttaacttttcttttcattcagcggtttggaaacactctgtttgtaaagtctgcacgtggatattttgaccacttagaggccttcgttgaaaacgggattttttcatgtaaggctagacagaagaattcccagtaacttccttgtgttgtgtgcattcacctcacagagctgaacgttcccttagacagagcagatttgaaacactctatttgtgcaatttgcaagtgtagatttcaagcgctttaaggtcaatggcagaaaaggaaatatcttcgtttcaaaactagacagaatgattctcagaaactcctttctgacgtgtgcgttcaactcacagagtttaacctttcttttcatagagcagttaggaaacactctgtttgtaaagtctgaaagtggatattcagacctctttgaggccttcgttggaaacgggatttcttcatattatgcctgacagaagaattctcagtaacttaccttgtgttgtgtgtattcaactcacagagttgaacgatcctttacacagagcagacttgaaacactctttttctggaatttgcaagtggagatttcagccgctttgaggtcaatggtagaataggaaatatcttcttatagaaactagacagaatgattctcagaaactcctttgtgatgtgtgcgttcaactcacagagtttaacttttcttttcatagagcagttaggaaacactctgtttgtaaagtctgcaagtggatattcagacctctttgaggccttctttggaaacgggatttcttcatattatgctagacagaagaattcccagtaacttccttgtgttgtgtgtgttcaactcacagagttgaactttcatttacacagagcagatttgaaacactctttttgtggaatttgcaaatggagatttcagccgcgttgaggtaaatggtagaaaaggaaatatcttcgtttcaaaactagacagaatcattctcagaaactgctctgcgatgtgtgcgttcaactctcagagtttaacttttcttttcattcaacagtttggaaacactctgtttgtaaagtctgcacgtggatattttgaccacttagaggccttcgttggaaacgggtttttttcctgtaaggctagacagaagaattcccagtaacttccttgtgttgtgtgcattcaactcagagagttgaacgttcccttagacagagcagatttgaaacactctatttgtgcaatttgcaagtgtagttttcaagctctttaaggtcaatggcagaaaaggaaatatcttcgtttcaaaactagacagaatgattctcagagactcctttgtgatgtgtgcgttcaactcacagagtttaacctttcttttcatagagcagttgggaaacactctgtttgtaaagtctgcaagtggatattcagacatccttgaggctttcgttggaaacgggatttcttcatattctgctagaaagaaaaattctcagtaacttccttgtgttgtgtgtattcaactcacagaattgaacgatcctttacacagagcagacttgaaacactctttttgtggaatttgcaagtggagatttcagccgctttgaggtcaatggtagaaaaggaaatatcttcgtataaagactagacagatagattctcagaaactcctttgtgatgtgtgcgttcaactcacagagtttaacctttcttttcatagagcagttaggaaacactctgtttgtaaagtctgcaagtggatattcagccctctttgaggccttcgttggaaacgggtttttttcatataaggctagacagaagaattctcagtaacttctttctgttgtgtgtattcaactgacagagttgaactttcatttagagagagcagatttgaaacactgtttttgtggaatttgcaagtggagattataagcgctttggggccaaaggcagaaaaggaaatatcttcgtataaaaactagacagaatcattctcagaaactgctctgtgatgtgtgcgttcaactctcagagtttaacttttcttttcattcagcagtttggaaaccctctgtttgtaaagtctgcacgtggatattttgaccacttagaggccttcgttggaaacgggtttctttcctttaaggctagacagaagaattctcagtaacttccttgtgttgtgtgcattcaactcacagagttgaacgttcccttagacagagcagatttgaaacagcctatttttgcaatttgcaagtgtagatttcaagcgctttaaggtcaacggctgaaaaggaaatatcttcctttcaaaactagacagaatcattcccacaaactgcgttgtgatgtgttcgttcaactcacagagtttaagctttctgttcatagagcagttaggaaacactctgtttgtaaagtctgtaagtggatattctgacatcttgtggccttcgttggaaacgggatttcttcatattctgctagacagaagaattctcaggaacttccttgtgttgtgtgttttcaactcacagagttgaacgatcctttacacagagcagacttgaaacactcttttggtggaatttgcaagtggacatttcagccgctttgaggtcaatggtagaaaaggaaatatcttcgtataaaaactagacagaatgattctcagaaactcctttgtgatgtgtgcgttcaactcacagagtttaacctttcttttcatagagcagttgggaaacactctgtttgtaaagtctgcaagtggatattcagacttctttgaggccttcgttggaagcggggtttcttcatattctgctagacagaagaattctcagtaacttccttgtgttgtgtgtattcaactcacagaattgaacgatcctttacacagagcagacttgaaacactctttttgtggaatttgcaagtggagatttctgccgctttgaggtcaatggtagaaaaggaaatatcttcgtataaaaactagacagaatcattctaagaaactgctctgcgatgggtgtgttcaactctcagagtttaacttttcttttccttcagcagtttggaaacactctgtttgtaaagtctgcacgtggataatttgaccacttagaggccttcgttggaaacgggtttttttcatgtaagtctagacagaagaattcccagtaacttccttgtgttgtgtacattcaactcacagagttgaacgttcccttagacagagcagatttgaaatactctttttgtgcaattggcaagtggagatttcaagcgctttaaggtcaatggcagaaaaggaaatatcttcgtttcaaaactagacagaatcattcccacaaactgcgttgtgatgtgttcgttcaactcacagagtttaacctttcttttcatagagcagttaggaaacactctgttggtaaattctgtaagtggatattctgacatcttgtggccttcgttggaaacaggatttcttcatattctgctacacagaagaattctcagtaacttccttgtgttgtgtgtattcaactcacagagttgaacgatcctttacacagagcagacttgtaacactctttttgtggaatttgcaagtggagatttcagccgctttgaagtcaaaggtagaaaaggaaatatcttcctataaaaaatagacagaaatgattctcagaaacttctttgtgatgtgtgcgttcaactcacagagtttaacctttcttttcatagagcagttaggaaacactctgtttgtaaactctgcaagtggatattcagacctctttgaggccttcgttggaaacgggatttcttcatactatgctagacagaagaattcccagtaacttccttgtgttgtgtgtgttcaactcacagcagttgaactttcatttacacagagcagatttgaaacactctttttgtggaatttgcaagtggagatttcaagcgctgtgaggccaaaggcagaaaaggaaatatcttcgtataaaaactagacagaatcattctcagaaagtgctctgcgatgtgtgcgttcaactctcagagtttaactttgcttttcattcagcagtttggaaacactctgtttgtaaagtctgcacgtggataatttgaccacttagaggccttcgttggaaacgggtttttttcatgtaaggctagacagaagaattcccagtaacttccttgtgttgtgtacattcaactcacagagttgaacgttcccttagacagagcagatttgaaacactctttttgtgtaattggcaaatggagatttcaagcgctttaaggtcaatggcagaaaaggaaatatcttcgtttcaaaactagacagaagcattcccacaaactgcgttgtgatgtgttcgttcaactcacagagtttaacctttcttttcatagagcagttaggaaacagtctgtttgtgaattctgtaagtggatattctgacatcttgtggccttcgttggaaacgggatttcttcatattctgctagacagaagaattctcagaatcttccttgtgttgtgtgtattcaactcacagagttgaacgatggtttacacagagcagatttgaaacactctttttgtggaattttcaagtggagatttcagccgctttgaggtcaatggtagaaaaggaaatatcttcgtataaaaactagacagaatgattctcagaaacttctttgtgatgtgtgcgttcaactcacagagtttaacctttcttttcatagagcagttaggaaacactgtgtttttaaactgtccaagtggatattcagacctctttgaggccttcgttggaaacgggatttcttcatactgtgctagacagaagaattcccagtaacttccttgtgttgtgtgtgttcaactcacagagttgaactttcatttacacagagcagatttgaaactctctttttgtggaatttgcaaatggagatttcaagcgctttgaggccaaaggcagaaaaggaaatgtcttcgtttcaaaactagacagaatcattctcagaaactgctctgcgatgtgtgcgttcaactctcagagtttaacttttcttttcattcagcagtttggaaacactctgtttgtaaagtctgcacgtggataatttgaccacttagaggccttcattggaaacgggtttttttcatgtaaggctagacagaagaattcccagtaacttccttgtgttgtgtgcattcaactcacagagttgaacgttcccttagacagagcagagttgaaacactctatttgtgcaatttgcaagtgtagatttcaagcgctttaaggtcaatggcagaaaaggaaatatcttcgtttcaaaactagacagaatgattctcagaaactcctttgtgatgtgtgcgttcaactcacacagttcaacctttcttttcatagagcagttgggaaacactctgtttgtaaagtctgcaagtggatattcagacttctctgaggccttcgttggaagcgggatttcttcatgttctgctagacagaagaattctcagtaactgccttgtgttgtgtgtattcaactcacagagttgaacgatcctttacactcagcagacttgaaacactctttttgtggaatttgcaagtggagatttcagccgctttgaggtcaatggtagaataggaaatatcttcctatagaaactagacagaatgattctcataaactcctttgtgatgtgtgcattcaactcacagagtttcacctttcttttcatagagcagttaggaaacactctgtttgtaaagtctgcaagtggatattcagacctccttgaggtcttcgttggaaacgggatttcttcatattctgctagatagaagaattctcagtaacttccttctgttgtgtgtattcaactcacagagttgaacgatcctttacacagagcagacttgaaacactctttttgtggaatttgcaagtggagatttcagccgctttgaggtcaatggtagaaaaggaaactatcttcgtataaagactagacagaatcattctcagaaactgctgcgtgatgtgtgcgttcaactctcagagtttaacttttcttttcattcagcggtttggaaacactctgtttgtaaagtttgcacgtggatattttgaccacttagaggccttcgttggaaacgggtttttttcatgtaaggctagacagaagaattcccagtaacttccttgtgttgtgtgcattcaactcacagagttgaacgttcccttagacagagcagatttgaaacagcctatttgtgcaattgcaagtgtagatttcaagctctttaaggtcaacggcagaaaaggaaatatcttcgtttcaaaactagacagaatcattcccacaaactgcgttgtgatgtgttcgttcaactcacagagtttaacctttgttttcatagagcagttaggaaacagtctgtttgtcaattctgtaagtggatattctgacatcttgtggccttcgttggaaacgggatttcttcatattctgctagacagaagaattctcagtaacttccttgtgttgtgtgtattcaactcacagagttgaacgatcctttacacagagcagacttgaaacactctttttgtgaaatttgcaagtggagatttcagccgctttgaggtcaatagtagaaaaggaaatatcttcgtagaaaaactagacagaatgattctcagaaactcctttgtgatgtggtgttcaactcacagagtttaacctttcttttcatagagcagttagtaaacactctgtttataaagtctgcaagtggatattcagacccctttgaggccttcgttggaaacgggatttcttcatattatgctagacagaagaattcccagtaacttccttgtgttgtgtgtgttcaactcacagagttgaactttcatttacacagagcagatttgaagcactctttttgtggaatttgcaggtggagatttcaagcgctttgaggccaaaggcagaaaaggaaatatcttcgtataaaaactagacagaatcattctcagaaactgctctgcgatgtgtgcgttcaagtctcagagtttaacttttcttttcattcagcagtttggaaacactctgtttgtaaagtctgcacgtggataatttgaccacttagaggccttcgttggaaacgggtttttttcatgtaaggctagacagaagaattctcagtaacttccttgtgttgtgtgtattcaactcacacagttgaacgatcctttacacagagcagacttgtaacactctttttgtggaatttgcaagtggagatttcagccgctttgaagtcaaagtagaaagggaaatatcttcctataaaaactagacagaatcattcccacaaactgcgttgggatgtgttcgttcaactcacagagtttaacctttcttttcatagagcagttaggaaacagtctgtttgtcaattctgtaagtggatattctgacatcttgtggccttcgttggaaacgggatttcttcatattctgctagacagaagaattctcagtaacttccttgtgttgtgtgtattcactcacagagttgaacgatcctttacacagagcagacttgtaacactctttttgtggaatttgcaagtggagatttcagccgctttgaagtcaaaggtagaaaaggaaatatcttcctataaaaactagacagaatgattctcagaaactcctttgtgatgtgtgcgttcaactcaaagagtttaacttttcttttcatagagcagttaggaaacactctgtttgtatagtctgcaagtggatattcagacctatttgaggccttcgttggaaacgggatttcttcatattatgctagacagaagaattcccagtatcttccttgtgttgtgtgtgttcaactcacagagttgaactttcatttacacagagcagatttgaaacactctttttgtggaatttgcaagtggagatttcaagcgctgtgaggccaaaggcagaaaaggaaatatcttcgtataaaaactagacagaatcattctcagaaactgctctgcgatgcgtgcgttcaactctcagagtttaacttttgttttcattcagcagtttggaaacactctgtttgtaaagtctgcacgtggataatttgaccacttataggccttcgttggaaacgggtttttttcctgtaaggctagacagaagaattcccagtaacttccttgtgttgtgtgcattcaactcacacagatgaacgttcccttagacagagcagatttgaaacactctatttgtgcaatttgcaagtgtagatttcaagcgctttaaggtcaatggcagaaaaggaaatatcttcgtttcaaaactagacagaatcattcccacaaactgcgttgtgatgtgttcgttcaactcacagagattaacctttctgttcatagagcagttaggaaacactctgtttgtaaagtccgtaagtggatattctgacatcttgtggccttgtttggaaaccggacttcttcatatactgctagacagaataattctcagtaacttccttgtgttgtgtgtattccactcacagagttgaacgatcctttacagagagcagacttgaaacactctttttgtggaatttgcaagtggagatttcagccgctttgaggtcaatggtagaatagggaatatcttcctatagaaactagacagaatgattctcagaaactcctttgtgatgtgtgtgttcaactcacagagtttaacctttcttttcatagagcagttagtaaacactctgtttataaagtctgcaagtggatattcaggcccctttgaggccttcgttagaaacgggatttcttcatattatgctagacagaagaattctcagtaacttccttctgttgtgtgtattcaagtgacagagttgaactttcatttagagagagcagatttgaaacactgtttttgtggaatttgcaagtggagatttcaagcgctttggggccaaaggcagaaaaggaaatatcttcgtataaaaagtagacagaatcattctcagaaaatgctctgtgatgtgtgcgttgaactctcagagtttaacttttgttttcattcagcagtttggaaatactctgtttgtaaattctgcacgtggatattttgaccacttagaggccttcgttggaaacgggtttttttcatgtaagggtagacagaagaattcccagtaacttccttgtgttgtgtacattcaactcacagagttgaacgttttcttagacagagcagatttgaaacactctttttgtgcaattggcaaatggagatttcaagcgctttaaggtcaatggcagaaaaggaaatatcttcgtttcaaaactagacagaatcattcccacaaactgcgttgtgatgtgttcgttcaactcacagagttttacctttcttttcatagagcagttaggaaacagtctgtttgtcaattctgtaagtggatattctgacatcttgtggccttcgttggaaacgggatttcttcatattctgctagacagaagaattctcagtaacttccttgtgttgtgtgtattcaactcacagagttgaacgatcctttacacagagcagacttgaaacactctttttgtggaatttgcaagtggagatttcagccgctttgaggtcaatggtagaaaaggatatatcttcgtataaagactagacagaatgattctcagaaactcctttgtgttgtgtgtgttcaactcacagagtttaacctttctttccatagagcagttaggaaacactctgtttgtaaagtctgcaagtggatattcagacctcctagaggccttcgttggaaacaggatttcttcatattatgctagacagaagaattcccagtaacttccttgtgttgtgtgtgttcaactcacagagttgaactttcatttacacagagcagatttgaaacactctttttgtggaatttgcaagtggagatttcatgcgctttgaggccaaaggcaaaaaaggaaatatcttcgtttcaaaactagacagaatcattctcagaaactgctctgcgatgtgtgcgttcaactctcagagtttaacttttcttttcattcagcagtttgaaaacactctgtttgtaaagtctgcacgtggatattttgaccacttagaggccttcgttggaaacgggtttttttgcctgtaaggctagacagaagaattcccagtaacttccttgtgttgtgtacattcaactcacagagttgaacgttcccttagacagagcagatatgaaacactctttttgtgcaattggcaaatggagatttcaagcgctttaaggtcaatggcagaaaaggaaatatcttcgtttcaaaactagaccgagtgattctcagaaactcctttgtgatgtctgcgttcaactcacagagtttaacctttcttttcatagaacagttaggaaacactctgtttgtaaagtctgcaagtggatattcagacctccttgaggccttcgttggaaacggtatttcttcatattctgctatacagaagaattctcagaaacttccttgtgttgtgtgtattcaactcacagagttgaacgatcgtttacacagagcagacttgagacactctttttgtggtatttgtaagtggagatttcagccgctttgaggtcaatggtagaaaaggaaatatcttcgtataaaaactagacagaatgattctcagaaactcctttgtgatgtgtgtgttcaactcacagagtttaacctttcttttcatagagcagttaggaaacactctgtttgtaaagtctgcaagtggatattcagacctctttgaggccttcgttggaaacgggatttttcatataaggctagacagaagaattcccagtaacttcccttgtgttgtgtgtgttcaactcacagagttgaactttcatttacacagagcagatttgagacactctttttgtggaatttgctaatggagatttcaagcgctttgaggccaaaggcagaaaaggaaatatcttcgtataaaaactagacagaatcattctcagaaactgctgcgtgatgtgtgcgttcaactctcagagtttaacttttcttttcattcagcagtttggaaacactctgtttgtaaagtctgcacgtggaaattttgaccacttagaggccttcgttggaaacgggtttttttcatgtaaggctagacagaagaattctcagtaacttccttgtgttgtgtgtattcaactcacagagttgaacgatcctttacacagagcagacttgaaacactctatttgtgcaattggcaagtgtagatttcaagcgctttaaggtcaatggcagaaaagggaatatcttcgtttcaaaactagacagaatcattcccacaaactgcgttgtgatgtgttcgttcaactcacagagtttaacctttctgttcatagagcagttaggaaacactctgtctgtaaagtctgcaagtggatattcagacctccttgaggccttcgttggaaacgggatttcttcatattctgctagacagaagaattctcagtaacttccttgtgttgtgtgtattcaactcacagacttgaaggatcctttacagagaggaggcttgaaaccctctttttgtggaatttgcaagtggagatttcagccgctttgaggtcaatggtagaataggaaatatcttcttatagaaactagacaaaatgattctcataaactcctttgtgatgtgtgcgttcaactcacagaagtttaacctttctgttcatagagcagttaggaaacactctgtttgtaaagtctgcaagtggatattcagacctccttgaggccttcgttggaaacgggatttcttcatattctgctagacagaagaattcccagtaacttccttgtgttgtgtgtgttcaactcacagagttgaactttcatttacacagagcagatttgaaacactctttttgtggaatttggaaatggagatttcaagcgctttgaggccaaaggcagaaaaggaaatatcttcgtataaaaactagacagaatcattctcagaaactgctgcgtgatgtgttcgttcaactctcagagtttaacttttcttttcattcagcggtttggaaacactctgtttgtaaagtctgcacgtggatattttgaccacttagaggccttcgttggaaacgggtttttttcatgtaaggctagacagaagaattcccagtaacttccttgtgttgtgtgtgttcaactcacagagttgaactttcatttacacagagcagatttgaaacactctttttgtgcaattggcaaatggagatttcaagcgctttaaggtcaatggcagaaaaggaaatatcttcgtttcaaaactagacagaatcattcccacaaactgcgttgtgatgtgttcgttcaaatcacagagtttaacctttctgttcatagagcagttaggaaacactctgtttgtaaagtctgtaagtggatattctgacatcttgtggcgttcgttggaaacgggatttcttcatcttctgctagagagaagaattctcagtaacttccttgtgttgtgtgtattcaactcacagagttgaacgttcctttacacagagcagacttgaaacactcgttttgtggaatttgcaagtggagatttcagccgctttgaggtcaatggtagaaaaggaaatatcttcgtataaaaactagacagaatgattctcagaaactcctttgtgatgtgtgcgttcaaatcacagagtttaacctttcttttcatagagcagttaggaaacactctgtttgtaaagtctgcaagtggatattcagacctccttgaggccttcgttggaaacgggatttctacatattatgctagacagaagaattcccagtaacttcccttgtgttgtgtgtgttcaactcacagagttgaactttcatttacacagagcagatttgaaacactctttttgtggaatttgcaaatggagatttcaagcgctttgaggccaaaggcagaaaaggaaatgtcttcgtttcaaaactagacagaatcattctcagaaactgctctgcgatgtgtgcgttcaactctcagagtttaacttttcttttcattcagcagtttggaaacactctggttgtaaagtctgcacttggataacttgaccacttagaggacttcgttggaaacgggtttttttacctgtaaggctagacagaagaattctcagtaacttccttttgttgtgtgtattcaactcacagagttgaacgatcctttacacagagcagacttgaaacactctttttgtggaatttgcaagtggagatttcagccgctttgaggtcaatggtagaataggaaatatcttcctatagaaactagacagaatgattctgagaaactcctttgtgatgtgtgcgttcaactcacagagtttaacctttcttttcatagagcagttaggaaacactctgtttgtaaagtctgcaagtggatattcagacatctttgaggccttcgttggaaacgggatttcttcatgttctgctagacaaaagaattctcagtaacttcctagtgttgtgtgtattcaactcacagagttgaacgatcctttacacagagcggacttgaaacactctttttgtggaatttgcaagtggagatttcagccgcgttgaggtcaatggtagaaaaggaaatatcttcgtataaaaactagacagaatgattctcagaaactcctttgtgatgtgtgcgttcaactcacagagtttaacctttcttttaatagagcagttaggaaacactctgcttgtaaagtctgcaagtggatattcagccctctttgaggccttcgttggaaacgggtttttttcatataaggctagacagaagaattctcagtaacttccttgtgttgtgtgtgttcaacacacagagttgaactttcatttacccagagcagatttgaaacactctttttgtggaatttgcaagtggagatttcaagcgctttgaggccaaaggcagaaaaggaaatatcttcgtttcaaaactagacagaatcattctcagaaactgctatgcgatgtgtgcgttcaactctcagagtttaacttttcttttcattcagcagtttggaaacactctgtttgtaaagtctgcacgtggatatttgaccacttagaggccttcgttggaaacgggtttttttcctgtaaggctagacagaagaattctcagtaactttccttgtgttgtgtgtattcaactcacagagttgaacgatcctttacacagagcagacttgtaacactctttttgtggaatttgcaagtggagatttcagccgctttgaagtcaaaggtagaaaagggaatatcttcctataaaaactagacagaattattctcagaaactcctttgtgatgtgtgtgttcaactcacagagtttaacctttcttttcatagagcagttagtaaacactctgtttataaagtctgcaagtggatattcagacccctttgaggccttcgttggaaaagggatttcttcatattatgctagacagaagaattctcagtaacttccttgtgttgtgtgtattcaactcacagagttgaacgatcctttacagagagtagacttgaaacactctttttttggaatttgcaagtggagatttcagccgctttgaggtcaatggtagaataggaaatatcttcctatagaaactagacagaatgattctcataaactcctttgtgatgtgtgcgttcaactcacagagtttaacctttcttttcatagagcagttaggaaacactctgtttgtaaagtctgcaagtggatattcagacctttttgaggccttcgttggaaacgggatttcttcatattctgctagacagaagaattctcagtaacttccttgtgttgtgtgtattcaactgacagagttgaactatcatttagagagagcagatttcaaacactgtttttgtggaatttgcaagtggagatttcaagcgctttggggccaaaggcagaaaaggaaatatcttcgtataaaaactagacagaatcattctcagaatctgctgcgtgatgtgtgcgttcaactctcagagtttaacttttcttttcattcagcggtttggaaacactctgtttgtaaagtctgcacgtggatattttgaccacttagaggccttcgttggaaacgggtttttttcatgtaaggctagacagaagaattcccagtcacttccttgtgttgtgtgcattcaactcacagagttgaacgttcccttcagacagagcagatttgaaacactctatttgtgcaatttgcaagtgtagatttcaagcgctttaaggtcaacggcagaaaaggaaatatcttcgtttcaaaactagacagaatgattctcagaaactcctttgtgatgtgtgcgttcaactcacagagtttaacctttctttttatagagcagttaggaaacactctctaaagtctgcaagtggatattcagacctctttgaggccttcgttggaaacgggatttcttcatattatgctagacagaataattctcagtaacttccttgtgttgtgtgtattcaactcacagagttgaacgatcctttacagagtgcagacttgaaacactctttttgtggaatttgcaagtggagatttcagccgctttgaggtcaatgatagaataggaaatatcttcctatagaaactagacagaatgattctcagaaactcctttgtgatgtgtgcattcaactcacagagtttaacctttcttttcatagagcagttaggaaacactctgtttgtaaagtctgcaagtggatattcagacctctttgaggccttcgttggaaacgggatttcttcatattctgctagagagaagaattctcagtaacttccttgtgttgtgtgtattcaactcaaagagttcaacgatcctttatacagagcagacttgaaacactctttttgtggaatttgcaagcggagatttcagccgctttgaggtcaattgtagaaaaggaaatatcttcgtataaaaactagacagaatcattctcagaaactgctctgcgatgtgtgcgttcaactctcagagtttaacatttcttttcattcagcagtttggaaacactctgtttgtaaagtctgcacgtggataatttgaccacttagaggccttcgttggaaacgggtttttttcatgtaaggctagacagaagaattcccagtaacttccttgtgttgtgtgcattcaactcacagagatgaacgttcccttagacagagcagatttgaaacagtctatttgtgcaatttgcaagtgtagatttcaagcgctttaaggtcaatggcagaaaaggaaatatcttcgtttcaaaactagacagaatcattcccacaaactgcgttgtgatgtgttcgttcaacccacagagtttaacctttctgttcatagagcagttaggaaacactctgtttgtaaagtctgcaagtggatattctgacatcttgtggccttcgttggaaacgggatttcttcatattctgctagacagaagaattctcagtaacttccttgtgttgtgtgtattcaactcacacagttgaacgatcctttacacagagcagacttgtaacactctttttgtggaatttgcaagtggagatttcagccgctttgaagtcaaaggtagaaaaggaaatatcttcctataaaaacaagacagaatgattcttagaaactcctttgtgatgtgtgcgttcaactcacagagtttaacctttcttttcatagagcagttaggaaacactctgtttgtaaagtctgcaagtggatattcagacctctttgaagccttcgttggaaacgggatttcttcatattatgctagacagaagaattctcagtaacttccttgtgttgtgtgtattcaactgacagagttgaactatcatttagagagagcagatttgaaacactgtttttgtggaatttgcaagtggagatttcaagcgctttggggccaaaggcagaaaaggaaatatcttcgtataaaaaatagacagaatcattctcagaatctgctgcgtgatgtgtgcgttcaactctcagagtttaacttttcttttcattcagcggtttggaaacactctgtttgtaaagtctgcacgtggatattttgaccacttagaggccttcgttggaaacgggtttttttcatttaaggctagacagaagaattcccagtaacttccttgtgttgtgtacattcaactcacagcaggtgaacgttcccttagacagagcagatttgaaacactctttttgtgcaattggcaagtggagatttcaagcgctttaaggtcaatggcagaaaaggaaatatcttcgtttcaaaactagacagaatcattcccacaaactgcgttgtgatgtgttcgttcaactcacagagtttaacctttcttttcatagagcagttaggaaacactctgtttgtaaagtctgcaagtggatattcagacctctttgaggccttcgttggaaacgggatttcttcatactgtgctagacagaagtattctcagtaacttccttgtgttgtgtgtattcaactcacagagttgaatcatcctttacacagagcagacttgaaacactctttttgtggaatttgcaagtggagatttcagccgcgttgaggtcaatggtagaaaaggaaatatcttcgtataaaaactagacagaatgattctcagaaactcctttgtgatgtgtgtgttcaactcacagagtttaacatttcttttcatagagcagttaggaaacactctgtttgtaaagtctgcaagtggatattcagacctctttgaggccttcgttggaaacgggtttttttcatataaggctagacagaagaattcccagtaacttccttgtgttgtgtgtgttcaactcccagagttgaactttcatttacacagagcagatttgaaacactctttttgtggaatttgcaaatggagatttcaagcgctttgaggccaaaggcagaaaaggaaatatcttcgtataaaaactagacagaatcattctcagaaactgctctgtgatgtgtgcgttcaactctcagagtttaacttttcttttcattcagcagtttggaaacactctgtttgtaaattctgcacgtggatattttgaccacttagaggccttcgttggaaacgggtttttttcatgtaagggtagacagaagaattcccagtaacttcctgtgttgtgtacattcaactcacagagttgaacgttcccttagagagagcagatttgaaatactctttttgtgcaattggcaagtggagatttcaagcgctttaaggtcaatggcagaaaaggaaatatcttagtttcaaaactagacagaatgattctcagaaactcctttgtgatgtgtgcgttcaactcacagagtttaacctttcttttcatagagcagttaggaaacactctgtttgtaaagtctgcaagtggatattcagacctctttgaggccttcgttggaaacgggatttcttcatattatgctagacacaagaattctcagtaacttccttgtgttgtgtgtattcaactcacagagttgaacgatttcttacacagagcagagttgaaacactctttttctggaatttgcaagtggagatttcagccgctttgaggtcaatggtagaataggaaatatcttcctatagaaactagacagaatgattctcagaaactcctttgtgatgtgtgcgttcaactcacagagtttaacctttcttttcatagagcagttaggaaacactctgtttgtaaagactgcaagtggatattcagacctccttgaggccttcgttggaaacgggatttcttcatattatgctagacagaagaattcccagtaacttccttgtggtgtgtgtgttcaagtcacagagttgaactttcatttacacagagaagatttgaaacactctttttgtggaatttgcaagtggagatttcaagcgctttgaggccaaaggcagaaaaggaaatatcttcgtttcaaaactagacagaatcattctcagaaactgctgcgtgatgtgtgcgttcaactctcagagtttaacttttcttttcattcagcggtttggaaacactctgtttgtaaagtctgcaagtggatattttgaccacttagaggccttcgttggaaacgggtttttttcatgtaaggctagacagaagaattcccagtaacttccttgtgttgtgtacattcaactcacagagttgaacgttcccttagacagagcagatttgaaacactctttttgtgcaattggcaaatggagatttcaagcgctttaaggtcaatggcagaaaaggaaatatctttgtttcaaaactagacagaatgattctcagaaactcctttgtgatgtgtgtgttcaactcacagagtttaacttttcttttcatagagcagttaggaaacacaatgtttgtaaagtctgcaagtggatattcagacctccttgaggccttcgttggaaacgggatttcttcatattatgctagactgaagaattctcagtaacttcccttgtgttgtgtgtattcaactcacagagttgaacgatcctttacacagagcagacttgaaacactctttttgtggaatttgcaagtggagatttcagccgctttgaggtcaacggtagaataggaaatatcttcctatagaaactagacagaaatgattctcagaaactcctttgagatgtgtgtgttcaactcacagagtttaacctttcttttcatagagcagttaggaatcactctgtttgtaaagtctgcaagtggatattcagacctctttgaggccttcgttggaaacgggtttttttcatataaggctagacagaagaattctcagtaacttccttgtgttgtgtgtattcaactgacagagttgaactttcatttagagagagcagatttgaaaaactgtttttgtggaatttgcaagtggagatttcaagcgctttggggcaaaaggcaggaaaggaaatatcttcgtataaaaactagacagaatcactctcagaaactgctctgcgatgtgtgcgttcaactctcagagtttaacttttcttttcattcagcagtttggaaacactctgtttgtaaagtctgcacgtggatatttttaccactcagaggccttcgttggaaacgggtttttttcctgtaaggctagacagaagaattcccagtaacttccttgtgttgtgtacattcaactcacagagtttaacgttcccttagacagagcagatttgaaacactctttttgtgcaattggcaagtggtgatttcatccgctttgaggtcaatggtagaaaaggaaatatcttcgtataaaaactagacagaatcattcccacaaactgcgttgtgatgtgttcgttcatctcacagagtttaacctttcttttcatagagcagttaggaaacactatgtttgtaaattctgtaagtggatattctgacatcttgtggccttcgttggaaacgggatttcttcatattctgctagacagaagaattctcagtaactcccttgtgttgtgtgtattcaactcacagagttgaacgatcctttacacagagcagacttgtaacactctttttgtgtaatttgcaagtggagatttcagccgctttgaagtcaaaggtagaaaaggaaatatcttcctataaaaactagacagaatgattctcagaaactcctttgtgatgtgtgcgttcaactcacagagtttaacctttctgttcatagagcagttaggaaacactctgtttgtaaagtctgcaagtggatattcagacctccttgaggccttcggtggaaacgggatttcttcatattctgctagacagaagaattctcagtaacttccttgggttgtgtgtattcaactcacagagttgaacgatcctttacacagagcagacttgaaacactctttttgtggaatttacaagtggagatttcagccgttttgaggtcaatggtagaaaaggaaatatcttcgtataaagactagacagaatcattctcagaaactgctgcgtgatgtgtgcgttcaactctcagagtttaacttttcttttcattcagcggtttggaaacactctgtttgtaaagtctgcacgtggatattttgaccacttagaggccttcgttggaaacgggtttttttcatgtaaggctagacaaaataattctcagtaacttccttgtgttgtgtgtattcaactcacatagttgaacgatcctttacagagagcagacttgaaacactctttttgtggaatttgcaagtggagatttcagccgctttgaggtcaatggtagaataggaaatatcttcccatagaaaatagacagaatgattatcataaactcctttgtgatgtgtgccttcaactcacagagtttaacctttcttttcatagagcagttaggaaacactctgtttgtaaagtctgcaagtggatattcagacctccttgaggccttcgttggaaacgggatttcttcatattctgctagacagaagaattctcagtaacttccttgtgttgtgtgtattcaactcacagagttgaacgatcctttacaccgagcagacttgaaacactttttttgtggaatttgcaagtggagatttcagccggtttgaggtcaatagtagaaaaggaaatatcttcgtagaaaaactagacagaatgattctcagaaactcctttgtgatgtgtgcgttcaactcacaggagtttaacctttctgttcatagagctggtaggaaacactctgtttgtaaactctgcaagtggatattcagacctccttgaggccttcgttggaaacgggatttcttcatattctgctagacagaagaattcttagtaacttccttgtgttgtgtgtattcaactgacagagttgaactttcatttagagagagcagatttgaaacactgtttttgtggaatttgcaagtggagatttcaagcgctttggggccaaaggcagaaaaggaaatatcttcgtataaaaactaggcagaatcattctcagaaactgctgcgtgatgtgtgcgttcaactctcagagtttaacttttcttttcattcagctgtttggaaacactctgtttgtaaagtctgcacgtggatattttgaccacttagaggccttcgttggaatcgggtttttttcatgtaaggctagacagaagaattcccagtaacttccatgtgttgtgtgcattcaactcacagagttgaacgttcccttagacagagcagatttgaaacactctatttgtgcaatttgcaagtgtagatttcaagcgctttaaggtcaatggcagaaaaggagatatcttcgtttcaaaactagacagaatcattcccacaaactgcgttgtgatgtgttcgttcaactcacagagtttaacctttctgttcatagagcagttaggaaacactctgtttgtaaagtctgtaagtgcatattctgacatcttgtggccttcgttggaaacgggatttcttcatattctgctagacagaagaattctcagtaacttctttgtgttgtgtgtattcaactcacagagttaaacgatcctttacacagagcagacttgaaacactctttttgtggaattttcaagtggagatttcagccgctttgaggtcaatggtagaataggaaatatcttcctatagaaactagacagaatgattctcagaaactcctttgtgatgtgtacgttcaactcacagagttcaacctttcttttcatagagcagttaggaaacactctgtttataatgtctgcaattggatattcagacctctttgaggccttcgttggaaacgggatttcttcatattctgctagacagaagaattcccagtaacttccttgtgttgtgtgtgttcaactcacagagttgaactttcatttacacagagcagatttgaaacactctttttgtggaatttgcaagtggagatttcaagcgctttgaggccaaaggcagaaaaggatatatcttcgtataaaaactagacagaatcattctcagaaactgctctgcgatgtgtgcgttcaactctcagagtttaacttttcttttcattcagcagtttggaaacactctgtttgtaaagtctgcacgtggataacttgaccacttagaggccttcgttggaaacgggtttttttcacgtaaggctagacagaagaattctcagaaacttccttgtgtagtgtatattcaactcacagagttgaacgatcctttacacagagcagacttgaaacactctttttgtggattttgcaagtggagatttcaagcgcttttggggccaaagccagaaaaggaaatatcttcatataaaaactagacagaatcattctcagaaactgctctgcgatgtgtgcgttcaactctcagagtttaacttttcttttcattcagcagtttggaaacactctgtttgtaaagtctgcacgtggataatttgaccacttagaggccttcgttggaaacgggtttttttcatgtaaggcttgacagaagaattctcagtaacttccttgtgttgtgtgtattcaactcacagagttgaccgatcctttacacagagcagacttgtaacactctttttgtggaatttgcaagtggagatttcagccgctttgaagtcaaaggtagaaaagggaatatcttctaataaaaactagacagaatgattctcagaaactcctttgtgatgtgtgtgttcaactcaccgagtttaacctttcttttcatagagcagttagtaaacactctgtttataaagtctgcaagtggatattcagacccctttgaggccttcgttggaaacgggatttcttcatattatgctagacagaagaattctcagtaacttcccttgtgttgtgtgtattcaactgacatagttgaactttcatttagagagagcagatttgaaactctgtttttgtggaatttgcaagtggagatttcaagcgctttggggccaaaggcagaaaaggaaatatcttcgtataaaaactagacagaatcattctcagaaactgctctgtgatgtgtgcattcagctctcagagtttaacttttcttttcattcagcagtttggaaacactctgtttgtaaagtctgcactggatattttgaccacttagaggccttcgttggaaacgggtttttttcatgtaaggctagacagaagaattcccattaacttccttgtgttgtgtgcattcaactcacagagatgaaagatcccttagacagagcagatttgaaacactctatttgtgccatttgcaagtgtagatttcaagcgctttaaggtcaatggcagaaaaggaaatatcttcgtttcaaaactagacagaatcattcccacaaactgcgttgtgatgtgttcgttcaactcacagagtttaacctttctgttcatagagcagttaggaaacactctgtttgtaaagtctgtaagtggatattctgacatcttgtggccttcgttggaaacgggatttcttcatattctggtagacagaagaattctcagtaacttccttgttttgtgtgtattcaactcacagagttgaacgatcctttacagagagcagacttgaaacactctttttgtggaatttgtaagtggagatttcagccgctttgaggtcaacggtagaataggaaatatcttcctattgaaactagacagaatgattctcataaactcctttgtgatgtgtgcgttcaactcacagagtttaacctttcttttcatagagcagttaggaaacactctgtttgtaaagtctgcaagtggatattcagacctccttgaggccttctttggaaacgggatttcttcatattctgatagacagaagaattctcagtaacttccttgtgttgtgtgtattcaactcacagagttgaacgatcctttacagagagcagacttgaaacactctttttgtggaatttgcaagtggagatttcagccgctttgaggtcaatggtagaaaaggaaactatgttcgtataaagactagacagaatgattctcagaaactgctttgtgatgtgtgcgttcaactcacagagtttaacctttcttttcatagagcagttaggaaacactctgtttgtaaagtctgcaagtggatattcagacctctttcaggacttctttggaaacgggatttcttcatattctgctagacagaagaattctcagtaacttccttgtgttgtgtgtattcaactcatagagttgaacgatcctttagaggagagcagtcttgaaacactctttttgtggaatttgcaagtggagatttctgccgctttgaggtcaatggtagaataggaaatatcttcctatagaaactagacagaatgattctcagaaacttctttgtgatgtgtgcgttcaactcacagagtttaacctttcttctcatagagcagttaggaaacactctgtttgtaaagtctgcaattggatattcagacctctttgaggccttctttggaaacgggatttcttcatactgtgctagacagaagaattctcagtaacttccttgtgttgtgtgtattcaactcacagagttgaacgatcctttacacagagcggacttgaaacactctttttgtggaatttgcaagtggagatttcagccgctttgaagtcaaaggtagaaaaggaaatatcttcctataaaaactagacagaaatgattctcagaaactcctttgtgatgtgtgcgttcaactcacagagtttaacctttcttttcatagagcagttaggaaacactctgtttgtaaagtctgcaagtggatattcagacctctttgaggccttcgttggaaacgggtttttttcatataaggctagatagaagaattcccagtaacttccttgtgttgtgtgtgttcaactcacagagttgaactttcatttacacagagcagatttgaaacactctttttgtggaatttgcaaattgagatttcaagcgctttgaggccaaaggcagaaaaggaaatatcttcgtataaaaactagacagaatcattctcagaaactgctctgcgatgtgtgcgttcaactctcaagagtttaacttttcttttcattcagcagtttggaaacactctgtttgtaaagtctgcacgtggatattttgaccacttagaggccttcgttggaaacgggtttttttcctgtaaggctagacagtagaattcccagtaacttccttgtgttgtgtacattcaactcacagagttgaacgttcccttagacagagcagatttgaaacactctttttgtgcaattggcaaatggagatttcaagcgctttaaggtcaatggcagaaaaggaaatatcttcgtttcaaaagtagacagaatcattcccacaaactgcgttgtgatgtgttcgttcaactcacagagtttaacctttctgttcatagagcagttaggaaacactctgtttgtaaagtctgtaagtggatattctgacatccttgtggccttcgttggaaacgggatttcttcatattctgctagacagaagaattctcactaacttccttgtgttgtgtgtattcaactcacagagttgaacgatcctttacacagagcagactggaaacactctttttgtggaatttgcaagtggagatttcagccgctttgaggtcaatggtagaaaaggaaatatcttcgtataaagactagacagagtgattctcagaaactcctttgtgatgtctgcgttcaactcacagagtttaacctttcttttcatagagcagttaggaaacactctgtttgtaaagtctgcaagtggatattcagacctccttgaggccttcgttggaaacgggatttcttcaaattctgctatacagaagaattcccagtaacttccttgtgttgtgtgtgttcaactcacagagttgaactttgatttacacagagcagatttgaaacacactttttgtggaatttgcaagtggagatttcaagcgctttgaggccaaaggcagaaaaggaaatatcttcgtataaaaactagacagaatcattctcagaaactgctgcgtgatgtgtgcgttcaactctcagagtttaacttttcttttcattcagcggtttggaaacactctgtttgtaaagtctgcacgtggaaattttgaccacttagaggccttcgttggaaacgggtttttttcatgtaaggttagacagaagaattcccagtaacttccttgtgttgtgtacattcaactcacagagttgaacgttcccttagacagagcagatttgaaacactctttttgtgcaattggcaaatggagatttcaagcactttaaggtcaatggcagaaaatgaaatatcttcgtttcaaaactagacagaatgattctcagaaactcctttgtgatgtgtgcgttcaactcacagagttcaaccttttttttcatagagcagttgggaaacactctgtttgtaaagtctgcaagtggatattcagacttctttgaggccttcgttggaagcgggatttcttcatattctgctagacagaggaattctcagtaacttccttgtgttgtgtgtattcaactcacagagttgaacgatcctttacacagagcagacttgtaacactctttttgtggaatttgcaagtggagatttcagccactttgaagtcaaaggcagaaaaggaaataacttcctataaaaactagacagaatgattctcagaaactcctttgtgatgtgtgcgttcaactcaccgagtttaccctttcttttcatagagcagttgggaaacactctgtttgtaaagtctgcaagtggatattcagacctccttgaggctttcgttggaaacgggatttcttcatattctgctagaaagaaggattcccagtaacttccttgtgttgtgtgtgttcaactcacagagttgaactttcatttacacagagcagatttgaaacactctttttgtggaatttgcaagtggagatttcaagcgctttgaggccaaaggcagaaaaggaaatatcttcgtttcaaaactagacagaatcattctcagaaactgctctgcgatgtgtgcgttcaactctcagagtttaacttttcttttcattcagcagtttggaaacactctgtttgtaaagtctgcacgtggataacttgaccacttagaggccttcgttggaaacgggtttttttcacgtaaggttagacagaagaattcccagtaacttccttgtgttgtgtacattcaactcacagagttgaacgttcccttagacagagcagatttgaaacactctttttgtgcaattggcaaatggagatttcaagcgctttaagttcaatggcagaaaaggaaatatcttcgtttcaaaactagacagaatcattcccacaaactgcgttgtgatgtgttcgttcaactcacagagtttaacctttctttcatagagcagttaggaaacagtctgtttgtcaattctgtaagtggatattctgacatcttgtggccttcgttggaaacgggatttcttcatattctgctagacagaagaattctcagtaacttccttgtgttatgtgtattcaactcacagggttgaacgatcctttacacagagcagacttgaaacactctttttgtggaatttgcaagtggagatttcagccgctttgaggtcaatggtagaaaaggaaatatcttcgtataaagactagacagaatgattctcagaaactcctttgtgatgtgtgcgttcaactcacagagtttaacctttcttttcatagagcagttaggaaacactctgtttgtaaagtctgcaagtggatattcagacctccttgaggccttggttggaaatgggatttcttcatattctgctagacagaagaattcccagtaacttccttgtgttgtgtgtgttcaactcacagatttgaactttcatttacacagagcagatttgaaacactctttttgtggaagttgcaagtggagatttcaagcgctttgaggccaaaggcagaaaaggaaatatcttcgtttcaaaactagacagaatcattctcagaaactgctgcgtgatgtgtgtgttcaactctcagagtttaactttccttttcattcaccggtttggaaacactctgtttgtaaagtctgcacgtggatattttgaccacttagaggccttcgttggaaacgggtttttttcatgtaaggctagacagaagaattcccagtaacttccttgtgttgtgtacattcaactcacagagttgaacgttcccttagacagagcagatttgaaacactctttttgtgcaattggcaaatggagatttcaagcgctttaagttcaatggcagaaaaggaaatatcttcgtttcaaaactagacagaatcattcccacaaactgcgttgtgatgtgttcgttcaactcacagagtttaacctttctgttcatagagcagttaggaaacactctgtttgtaaagtctgtaagtggatattctgacatcttgtggccttcgttggaaacggggtttcttcatattctgctagacagaagaattctcagtaacttccttgtgttgtgtgtattcaactcacagagttgaaagatcctttacacagagcagacttgaaacactctttttgtggaatttgcaagtggagatttcagccgctttgaggtcaatggtagaaaaggaaatatcttcgtataaagactagactgaatgattctcagaaactcctttgtgatgtgtgcgttcaactcacagagtttaacctttcttttcatagagcagttaggaaacactctgtttgtaaagtctgcaagtggatattcagacatccttgaggctttcgttggaaaggggatttcttcatattctgctagaaagaagaattctcagtaacttccttgtgttgtgtgtattcaactcacagagttgaacgatcctttacacagagcagacttgaaacactctttttgtggaatttgcaagtggagatttcagccgctttgagttcaatggtagaataggatatatcttcctatagaaactagacagaatgattctcagaaaatcctttgtgatgtgtgcgttcaactcaccgagtttaacttttcttttcatagagcagttaggaaacactctgtttgtaaagtctgcaagtggatattcagacctctttgaggccttctttggaaacgggatttcttcatattatgctagacagaagaattctcagtaacttccttgtgttgtgtgtattcaactgacagagttgaactttcatttagagagagcaggtttgaaacactgtttctgtggaatttgcaagtggggatttcaagcgctttggggccaaaggcagaaaaggaaatatcttcgtataaaaactagacagaatcattctcagaaactgctgcgtgatgtgtgcgttcaactctcagagtttaacttttcttttcattcagcggtttggaaacactctgtttgtaaagtctgtacgtggacattttgaccacttagaggccttcgttggaaacgggtttttttcatgtaaggctagacagaagaattcccagtaacttccttgtgttgtgtacattcaactcacagagttgaacgttcccttagacagagcagatttgaaacactctttttgtgcaattggcaagtggagatttcaagcgcgttgaggtcaatggcagaaaaggaaatatcttcgtttcaaaactagacagaatcattcccagaaactgcgttgtgatgtgttcgttcaactcacagagtttaacctttcttttcatagagcagttaggaaacagtctgtttgaaaattctgtaagtggatattctgacatcttgtggccttcgttggaaacgggatttcttcatattctgctagacagaagaattctcagaaacttccttgtgttgtgtgtattcaactcacagagttgaacgatcctttacacagagcagacttgaaacacactttttttggaattttcaagtggagatttcagccgctttgaggtcaatggtagaaaaggaaatatcttcgtataaagaatagacagaatgattctcagaaactcctttgtgatgtgggcgttcaactcacagagtttaacctttcttttcatagagccgttaggaaacactctgtttgtaaagtctgcacgtggatatttggacttctttgaggccttcgttggaaacgggtttttttcatgtaaggctagtcggaagagttcccactaacttccatgtgttgtgtgtgttcaattcacagagttgaactttcatttacacagagcagatttgaaacactctttttgtggaatttgcaaatggagatttcaagcgctttgaggccaaaggcagaaaaggaaatatcttcgtataaaaactagacagaatcattctcagaaactgctgcgtgatgtgtgcgttcaactctcagagtttaacttttcttttcattcagctgtttggaaacactctgtttgtaaagtctgcacgtggatattttgacaacttagaggccttcgttggaaacgggtttttttcatgtaaggctagacagaagaattctcagtaacttccttgtgttgtgtgtattcaactcacagagttgaacgatcctttacacagagcagacttgtaacacactttttgtggaatttgcaagtggagatttcagccgcttcgaagtcaaaggtagaaaaagaaatatcttcctataaaaacaagacagaatcattcccacaaactgcgttgtgatgtgttcattcaactcacagagtttaacctttcttttcatagggcagttaggaaacagtctgtttgtcaattctgtaagtggatattctgacatcttgtggccttcgttggaaacgggatttcttcatattctgctagacagaagaattctcagtaacttccgcgtgttgtgtgtattcaactcacagagttgaacgatcctttacacagagcagagttgaaacactctttttgtggaatttgcaagtggagatttcagccgctttgaggtcaatggtagaaaaggaaatatcttcgtataaaaagtagacagaatgattctcataaactcctttgtgatgtgtgcgttcaactcacagagtttaacctttcttttcatagagcagttaggaaaaactctgtttgaaaagtctgcaagtggatattcagacctccttgaggccttcgttggaaacgggatttcttcatattctgctagacagaacaattctcagtaatttccttgtgttgcgtgtattcaactcacagagttgaacgatcctttacacagagcggacttgaaacactctttttgtggaatttgcaattggagatttcagccgcgttgaggtcaatggtagaaaaggaaatatcttcgtataaaaactagacagaatcattctcagaaaccgctctgtgatgtgtgcgttcaactctcagagtttaacttttctttccattcagcagtttggaaacactctgtttgtaaagtctgcacgtggatattttgactacttagaggtctcggttggaaacgggtttttttcatgtaaggctagacagaagaattcccagtaacttccttgcgttgtgtacattcaactcacagagttgaacgttcccttagacagagcagatttgaaacactctttttgtgcaattggcaagtggagatttcaagcgctttgaggtcaatggcagaaaaggaaatatcttcgtttcaaaactagacagaatcattcccacaaactgcgttgtgatgtgttcgttcaactcacagagtttaacctttcttttcatagagcagttaggaaacagtctgtttgtaaattctgtaagtggatattctgacatcttgtggccttcgttggaaacgggatttcttcacattctgctagacagaagaattctcagtaacttccttgtgttgtgtgtattcaactcacagagttgaactgatcctttacacagagcagacttgaaacactctttttgtggaatttgcaagcggagatttcagccgctttgagttcaatggtagaataggaaatatcttcctatagaaactagacagaatgattctcagaaactcctttgtgatgtgggcgttcaactcacagagtttaacctttcttttcatagagcagttaggaaacactctgtttgtaaagtctgcaagtggatattcagacatctttgaggctttcgttggaaacgggatttcttcatattctgctatacagaagaattctcagaaacttccttgtgttgtgtgtattcaactcacagagttgaacgttcgtttacacagagcagacttgagacactctttttgtggaatttgtaagtggacatttcagccgctttgaggtcaatggtagaaaaggaaatatcttcatataaaaactagacagaatcattctcagaaactgctgcgtgatgtgtgcgttcaactctcaagagtttaacttttcttttcattcagcggtttggaaacactctgtttgtaaagtctgcacgtggatattttgaccacttagaggccttcgttggaaacgggtttttttcatgtaaggctagacagaaggattcccaggaacttccttgtgttgtgtacattcaactcacagagttgaacgttcccttagacagagcagatttgaaacactctttttgtgcaattggcaagtggtgatttcagccgctttgaggtcaatggtagaaaaggaaatatcttcgtataaaaactagacagaatcattcccacaaactgcgttgtgatgtgttcgttcaactcacagagtttaacctttctgttcatagagcagttaggaaacactctgtttgtaaactctgcaagtggatattctgacatcttgtggccttcgttggaaacgggatttcttcacattctgctagacagaagaattctcagtaacttccttgtgttgtgtgtattcaactcacagagttgaacgatcctttacagagagcagacttgaaacactctttttgtggaatttgcaagtggagatttcagccgctttgaggtcaagagtagaaaaggaaatatcttcgtagaaaaactagacagaattattctcctaaactccttcgtgatgtgtgcgttcaaatcacagagttgaacttttcttttcatagagcagttaggaaacactctgtttatatagtctgcaagtggatattcagacccctttgaggccttcgttggaaacgggatttcttcatattatgctagacagaagaattctcagtaacttccttgtgttgtgtgtattcaactgacagagttgaactttcttttagagagagcagatttgaaacactgtttttgtggaattttcaactggagatttcaagcgctttggggccaaaggcacaaaaggaaatatcttcgtataaaaactagacagaatcattctcagaaactgctctgcgatgtgtgcgttcaactctcagagtttaacttttcttttcattcagcagtttggaaacactctgtttgtaaagtctgcacgtggatattttgaccacttagaggccttcgttggaaacgagtattttttcctgtaaggctagacagaagaattcccagtaacttccttgtgttgtgtacattcaactcacagagttgaacgttcccttagacagagcagatttgaaagactctttttctgcaattggcaaatggagatttcaagcgctttaaggtcaatggcagaaaaggaaatatcttcgtttcaaaactagacagaatcattcccacaaactgcgttgtgatgtgttcgttcaactcacagagtttaacctttcttttcatagagcagttaggaaacagtctgtttgtcaattctgtaagtggatattctgacatcttatggccttcgttggaaacgggatttcttcatattctgctagacagaagaattctcagaaacttccttgtgttgtgtgttttcaactcacagagttgaacgatcctttacacagagcagacttgaaacattccttttgtggaatttgcaagtggagatttcagccgctttgaggtcaatggtagaataggaaatatcttcctatagaaactagacagaatgattctcagaaactcctttgtgatgtctgcgttcaactcacagagtttaacctttcttttcatagagcagttaggaaacactctgtttgtaaagtctgcaagtggatattcagacctccttgaggccttcgttggaaacgggatttcttcatattatgctagatagaagaattctcagtaactttccttgtgttgtgtgtattcaactgacagagttgaacgttcatttagagagagcagatttgaaacactgtttttgtggaatttgcaattggagatttcaagcgctttggggccaaaggcagaaaaggaaatatcttcgtataaaaactagacagaatcattctcagaaactgctgcgtgatgtgtgcgttcaactctcagagtttaacttttctttgcattcagcggtttggaaacactctgtttgtaaagactgcacgtggatattttgaccacttagaggccttcgttggaaacgggtttttttcatgtaaggctagacagaagaattcccagtaacttccttgtgttgtgtgcattccactcacagagttgaacgttcccttagacagagcagatttgaaacactctatttgtgcaatttgcaagtgtagatttcaagcgctttaaggtcaatggcagaaaaggaaatatcttcgtttcaaaactagacagaatcattcccacaaactgcgttgtgatgtgttcgttcatctcacagagtttaacctttcttttcatagagcagttaggaaacagtctgtttgtaaattctgtaagtggatattctgacatcttgtggccttcgttggaaacgggatttcttcatattctgctagacagaagaattctcagtaacttccttgtgttgtgtgtattcaactcacagagttgaacgatcctttacagagagcagacttgaaacactctttttgtggaatttgcaagtggagatttcagccgctttgaggtcaatggtagaaaaggaaatatcttcgtataaagaatagacagaatgattctcagaaactcctttgtgatgtgtgtgttcaactcacagagtttaacctttcttttcatagagcagttaggaaacactctgtttgtaaagtctgcaagtgggtattcagacctctttgaggccttcgttggaaacgggtttttttcatataaggctagacagaagaattcccagtaacttccttgtgttgtgtgtgttcaactcacagtagttgaactttcatttacacagagcagatttgaaacactctttttgtggaatttgcaggtggagatttcaagcgctttgaggccaaaggcagaaaaggaaatatcttcgtataaaaactagacagaatcattctcagaaactgctgcgtgatgtgtgcgttcaattctcagagtttaacttttcttttcattcagcggtttggaaacactctgtttgtaaagtctgcacgtggaaattttgaccacttagaggccttcgttggaaacgggtttttttcatgtaaggctagacagaagaattcccagtaacatccttgtgttgtgtacattcaactcacagagttgaacgttcccttagacaaagcagatttgaaacactctttttgtggaatttgcaaatggagatttcaagcgctttaaggtcaatggcagaaaaggaaatatcttcgtttcaaaactagacagaatcattcccacaaatggcgttgtgatgtgttcgttgaactcacagagtttaacctttctgttcatagagcagttaggaaacactctgtttgtaaagtctgtaagtggatattctgacatcttgtggccttcgttggaaacgggatttcctcatattctgctagacagaagaattctcagaatcttccttgtgttgtgtgtattcaactcacagagttgaacgatcctttacacagagcagacttgaaacactctttttatggaatttgcaagtggagatttcagccgctttgaggtcaatggtagaaaaggaaatatcttcctataaaaactagacagaatgattctcagaaaatcttttgtgatgtgtgcgttcaactcacagagtttaacttttcttctcatagagcagttaggaaacactctgtttgtaaagtgtgcaagtggatattcagacctctttgaggccttcgttggaaacgggatttcttcatattatgctagacagaataattctcagtaacttccttgtgttgtgtgtattcaactcacagagttgaacgatcctttacagagagcaggcttgaaacactctttttgtggaatttgcaagtggagatttcagccgctttgaggtcaatggtagaataggaaataccttcttatagaaactagacagaatcattctcagaaaatgctctgtgatgtgtgcgttcaactctcagagtttaacttttcttttcattcagcagtttggaaacactctgtttgtaaagtctgcacgtggatattttgaccacttagaggccttcgttggaaacgggtttttttcatgtaagggtagacagaagaattcccagtaacttccttgtgttgtgtgcattcaactcacagagttgaacattcccttagacagagcagatttgaaacactctatttgtgcaatttgcaagtgtagatttcaagcgctttaaggtcaatggcagaaaaggaaatatcttcatttcaaaactagacagaatcattcccacaaactgcgttgtgatgtgttcgttcaactcacagagtttaacctttcttttcatagagcagttaggaaacactctgttggtaaattctgtaagtggatattcttacatcttgtggccttcgttggaaacgggatttctacatattctgctagacagaagaattctcagtaacttcccttgtgttgtgtgtattcaactcacagagttgaacgatcctttacacagagcagacttgtaacactctttttgtgtaatttgcaagtggagatttcagccgctttgaagtcaaaggtagaaaaggaaatatcttcctataaaaactagacagaatgattctcataaactcctttgtgatgtgtgcgttcaactcacagagtttaacctttctgttcatagagctggtaggaaacactctgtttgtaaagtctgcaagtggatattcagacctccttgcggccttcgttggaaacgggatttcttcatattctgctagacagaagaattcccagtaacttccttgtgttgtgtgtgttcaactcacagagttgaactttcatttacacagagcagatttgaagcactctttttgtggaatttgcaaatggagatttcaagcgcttggaggccaaaggcagaaaaggaaatatcttcgtataaaaactagacagaatcattctcagaaactgctctgtgatgtgtgcgttcaactctcagagtttaacttttcttttcattcagcagtttggaaacactctgtttgtaaagtctgcacgtggataatttgaccacttagaggccttcgttggaaacgggtttttttcatgtaaggctacacagaagaattcccagtaacttccttgtgttgtgtacattcaactcacagagttgaacgttcccttagacagagcagatttgaaacactctttttgtgcaattggcaagtggtgatttcagccgctttgtggtcaatggtagaaaaggaaatatcttcgtataaaaactagacagaatcattcctacaaactgcgttgtgatgtgttcgttcaactcacagagtttaacctttctgttcatagagcagttaggaaacactctgtttgtaaagtctgtaagtggatattctgacatcttgtggccttcgttggaaacgggatttcttcatattctgctagacagaagaattctcagtaacttccttgtgttgtgtgtattcaactcacagagttgaacgatcctttacacagagcagacttgaaacactccttttgtggaatttgcaagtggagatttcagccgctttgaggtcaatggtagaaaaggaaactatcttcgtataaagactagacagaatgattctcataaactcctttgtgatgtgtgcgttcaactcacagagtttaacctttcttttcatagagcagttaggaaacactctgtttgtaaagtctgcaagtggatattcagacctctttgaggccttcgttggaaactggatttcttcatattatgctagacagaagaattcccagtaacttccttgtgatgtgtgtgttcaactcacagagttgaactttcatttacacagagcagatttgaaacactctttttgtggaatttgcaagtggagatttcaagcgctttgaggccaaaggcagaaaaggaaatatcttcgtataaaaactagacagaatcattctcagaaactgctgcgtgatgtgtgcgttcaactctcagagtttagcttttcttttcattcagcggtttggaaacactctgtttgtaaagtctgcacgtggatattttgaccacttagaggccttcgttggaaacgggttttttgcatgtaaggctagacagaagaattcccagtaacttccttgtgttgtgtgcattcaactcacagagttgaacgttcccttagacagagcagatttgaaacactctatttgtccaatttgcaagtgtagatttcaagcgctttaaggtcaacggcagaaaaggaaatatcttcgtttcaaaactagacagaatcattcccacaaactgcgttgtgaggtgttcgttcaactcacagagtttaacctttcttttcatagagcagttaagaaacagtctgtttgtaaattctgtaagtggatattctgacatcttgtggccctcgttggaaacgggatttcttgatattctgctagacagaagaattctcagtaacttccttgtgttgtgtgtattcaactcacagagttgaacgatcctttacacagagcagacttgaaacactgtttttgtggaatttgcaagtggagatttcagccgctttgagttcaatggtagaataggaaatatcttcctatagaaactagacagaatgattctcagaaactcctttgtgatgtgtgtgttcaactcacagagtttaacctttcttttcatagagcagttagtaaacactctgtttataaagtctgcaagtggatattcagacccctttgaggccttcgttggaaacgggatttcttcattttatgctagacagaagaattctcagtaacttccttgtgttgtgtgtattcaactgacagagttgaactttcatttagagagagcagatttgaaacactgtttttgtggaatttgcaagtggagatttcaagcgctttggggccaaaggcagaaaaggaaatatcttcgtgtaaaaactagacagaatcattctcagaaactgctctgcgatgtgtgcgttcaactctcagagtttaactttgcttttcattcagcagtttggaaacactctgtttgtaaagtctgcacgtggataatttgaccacttagaggccttcgttggaaacgggtttttttcatgtaaggctagacagaagaattctcagaaacttcattgtgttgtgtgtattgaactcacagagttgaacaatcctttacacagagcggacttgaaacactctttttgtggaatttgcaagtggagatttcagccgctttgaggtcaatggtagaaaaggaaatatcttcgtatagaaactagacagaatgattctcagaaactcctttgtgatgtgtgcgttcaactcacagagtttaacctttcttttcatagagcagttaggaaacactctgtttgtaaagtctgcaagtggaaattcagacctctttgagaccttcgttggaaacgggatttcttcatattctggtagacagaagaattctcagtaacttcccctgtgttgtgtgtattcaactcacagagttgaacgatcctttacagagagcagacttgaaacactctttttgtggaatttgcaagtggagatttcagccgctttgaggtcaatggtagaataggaaatatcttcccatagaaactagacagaatgattctcagaaactcctttgtgatgtgtgtgttcaactcacagagtttaacctttcttttcatagagcagttagtaaacactctgtttataaagtctgcaagtggatattcagaccccttggaggccttcgttggaaacgggatttcttcatattttgctagacagaagaattctcagtaacttccttgtgttgtgtgtattcaactgacagagttgaactttcatttagagagagcagatttgtaacactgtttttgtggaatttgcaagtggagatttcaagcgctttggggccaaaggcagaaaaggaaatatcttcgtataaaaactagacagaatcattctcagaaactgctctgtgatgtgtgcgttcaactctcagagtttaacatttcttttcattcagcagtttggaaacactctgtttgtaaagtctgcacgtggatattttgaccacttagaggccttcgttggaaacgggtttttttcatgtaaggctagacagaagaattcccagtgacttccttgtgttgtgtgcattcaactcacagagttgaacgttcccttagacagagcagatttgaaacactctatttgtgcaatttgcaagtgtagttttcaagctctttaaggtcaacggcagaaaaggaaatatcttcgtttcaaaactagacagaatcattcccacaaactgcgttgtgatgtgttcgttcaagtcacagagtttaacctttcttttcatagagcagttaggaaacagtctgtttgtcaattctgtaagtggatattctgacatcttgtggccttcgttggaaacgggatttcttcatattctcctagacagaagaattcccagtaacttccttgtgttgtgtgcattcaactcacagagttgaacgatccttcacacagagcagattagaaacactctttttattggaatttgcaagtggagatttcagccgctttgaggtcaacggtagaaaaggaaatatcttcgtataaaaactagacagaatgattctcagaaactcctttgtgatgtgtgtgttcaactcacagagtttaacctttcttttcatagagcagttagtaaacactctgtttataaagtctgcaagtggatattcagacccctttgaggccttcgttggaaacggggtttcttcatattctgctagacagaagaattcccactaacttccttgtgttgtgtgtgttcaactcacagagttgaactttcatttacacagagcagatttgaaacactctttttgtggaatttgcaagtggagatttcaagcgctttgaggccaaaggcagaaaaggaaatatcttcgtttcaaaactagacagaatcattctcagaaactgctctgcgatgtgtgagttcaactctcagagtttaacttttcttttcattcagcagtttggaaacactctgtttgtaaagtctgcacgtggatattttgaccacttagaggccttcgttggaaacgggtttttttcctgtaaggctagacagaagaattcccagtaacttccttgtgttgtgtgtgttcaactcacagagttgaactttcatttacacagagcagatttgaaacactctttttgtggaatttgcaagtggagatgtcaagcgctttaaggtcaatggcagaaaaggaaatatcttagtttcaaaactagacagaatcattcccacaaactgcgttgtgatgtgttcgttcaactcacagagtttaacctttcttttcatagagcagttaggaaacagtctgtttttaaattctgtaagtggatattctgacatcttgtggccttcgttggaaacgggatttgttcatattctgctagacagaagaattctcagtaacttccttgtgttgtgtgtattcaactcacagagttgaacgatcctttacacagagcagtcttgaaacactctttttgtggaatttgcaagtggagatttcagccgctttgaggtcaatggtagaataggaaatatcttcctatagaaactagacagaatgattctcagaaacttctttgtgatgtgtgcgttcaactcacagagtttaacctttcttttcatagagcagttaggaaacactctgtttgtaaactctgcaagtggatattcagacctctttgaggccttcgttggaaacgggatttcttcatactatgctagacaagaagaatcctcagtaacctccttgtgttgtgtgtattcaactgacagagttgaactttcatttagacagagcagatttgaaacactctttttgtggaatttgcaagtggacatttcaagcgcgttgaggccaaaggcagaaaaggaaatatcttcgtataaaaactagacagaatcattctcagaaactgctctgtgatgtgtgcgttcaactctcagagtttaacttttcttttcattcagcagtttggaaacactctgtttgtaaagtctgcacgtggataatttgaccacttagaggccttcattggaaacgggtttttttcatgtaaggctagacagaagaattcccagtaacttccttgtgttgtgtgcattcaactcacagagttgaacgttcccctagacagagcagatttgaaacactctatttgtgcaatttgcaagtgtagttttcaagctcttttaggtcaacggcagaaaaggaaatatcttggtttcaaaactagacagaatgattctcataaactcctttgtgatgtgtgcgttcaactcacagagtttaacctttcttttcatagagcagttaggaaacactctgtttgtaaagtctgcaagtggatattcagacctctttgaggccttcgttggaaacgggatttcttcatattctgctagacaaaagaattctcagtaacttccttgtgttgtgtgcattcaactcacagagttgaacgatcctttacacagggcagacttgaaacactctttttgtggaatttgcaaggggagatttcagcctcattgaggttaatggtagaaaatgaaatatcttcgtatagaaactagacagaatgattctcagaaactcctttgtgatgtgtgcgttcaactcacagagttcaacctttcttttcatagagcagttgggaaacactctgtttgtatagtctgcaagtggatattcagacttctttgaggccttcgttggaagcgggatttcttcatattctgctagacagaagaattctcagtaacttccttgtgctgtgtgtattcaactgacagagttgaactttcatttagagagagcagatttgaaacactgtttttgtggaatttgcaagtggagatttcaagcgctttggggccaaaggcagaaaaggaaatatcttcgtataaaaactagacagaatcattctcagaaactgctgcgtgatgtgtgcgttcaactctcagagtttaacttttcttttcattcagcggtttggaaacactctgtttgtaaagactgcacgtggatattttgaccccttagaggccttcgttggaaacgggtttttttcatgtaaggctagacagaagaattcccagtaacttccttgtgttgtgtacattcaactcacagagttgaacgttcccttagacagagcagatttgaaacactctttttgtgcaattggcaagtggtgatttcagccgctttgaggtcaatggtagaaaaggaaatatcttcgtataaaaactagacagaatgattctcagaaacttcattgtgacgtgtgcgttcaactcacagagtttaacatttcttttcatagagcagttaggaaacactctgtttgtaaagtctgcaagtggatattcagacctctttgaggccttcgttggaaacgggatttcttcatactgtgctagacagaagaattctcagtaacttccttgtgttgtgtgtattcaactcacagagttcaacgatcctttacacagagcagacttgaaacactctttttgtggaatttgcaagtggagatttcagccgctttgaggtcaatggtagaatagggaatatcttcctatagaaactagacagaatgattgtcagaaactcctttgtgatgtgtgcgttcaactcacagactttaacctttcttttcatagagcagttaggaaacactctgtttgtaaagtctgcaagtggatattcagacctccttgaggccttcgttggaaacgggatttcttcatattatgctagacagaagaattctcagtaacttccttgtattgtgtgtattcaactcacagagttgaacgatcctttacacagagcagacttgaaacactcttcttgtggaatttgcaagtggagatttcagccgctttgaggtcaatggtagaataggaaatatcttcctatagaaactagacagaatcattctcagaaactgctctgcgatgtgtgcgttcaactctcagagtttaacttttcttttcattcagcagtttggaaacactctgtttgtaaagtctgcacgtggatattttgaccacttagaggccttcgttggaaacgggtttttttcctgtaaggctagacagtagaattcccagtaacttccttgtgttgagtacattcaactcacagagttgaacgttcccttagacagagcagatgtgaaacactctttttgtgcaattggcaagtggagatttcaagcgctttaaggtcaatggcagaaaaggaaatatcttcgtttcaaaactagacagaatcattcccacaaactgcgttgtgatgtgttcgttcaactcacagagtttaacctttcttttcatagagcagttaggaaacagtctgtttgtaaattctgtaagtggatattatgacatcttgtggccttcgttggaaacgggatttcttcatattctgctagacagaagaattctcagtaacttccttgtgttgtgtgttttcaactcacagagttgaacgatcctttacacagagcagacttgaaacactccttttgtggaatttgcaagtggagatttcagccgctttgaggtcaatggtagaataggaaatatcttcctatagaaagtagacagaatgattctcagaaactcctttgtgatgtgtgtgttcaactcacagagtttaacatttcttttcatagagcagttaggaaacactctgtttgtaaagtctgcaagtggatattcagacctctttgaggccttcgttggaaacgggtttttttcatataaggctagagagaataattctcagtaacttccttgtgttgtgtgtattcaacacacagagttgaacgatcctttacacagagcagacttgaaacactctatttgtagaatttgcaagtggagatttcagccgctttgaggtcaatagtagaaaaggaaatatcttcgtagaaaaactagacagaatgattctcataaactcctttctgatgtgtgcattcaactcacagagtttcacctttcttttcatagagcagttaggaaacactctgtttgtaaagtctgcaagtggatattcagacctccttgaggccttcgttggaaacgggatttcttcttattctgctagacagaagaattcccagtaacttccttgtgttgtgtgtgttcaactcacagagttgaactttcatttacacagagcagatttgaaacactctttttgtggaattcgcaagtggagatttcaagcgctttgaggccaaaggcagaaaaggaaatatcttcgtataaaaactagacagaatcattctcagaaactgctctgcgatgtgtgcgttcaactctcagagtttaacttatcttttcattcagcagtttggaaacactctgtttgtaaagtctgcacgtggataatttgaccacttagaggtcttcgttggaaacgggtttttttcatgtaaggctagacagaagaattcccagtaacttccttgtgttgtgtgtgttcaactcacagagttgaactttcatttacacagagcagatttgaaacactctttttgtggaatttgcaaatggagatttcaagcgctttgaggccaaaggcagaaaaggaaatatcttcgtataaaaagctagacagataatcattctcagaaactgctgtgcgatgtgtgtgttcaactctcagagtttaactttgcttttcattcagcagtttggaaacactctgtttgtaaagtctgcacgtggataatttgaccacttagaggccttcgttggaaacgggtttttttcatgtaaggctggacagaagaattctcagtaacttccttgtgtggtgtgtattcaactcacagagttgaacgatcctttacacagagcagacttgtaaaactctttttgtggaatttgcaagtggagatttcagccgctttgaagtcaaaggtagaaaaggaaatatcttcctataaaaactacacagaatgattctcagaaactcctttgtgatgtgtgcgttcaactcacagagtttaacctttcttttcatagagcagttaggaaacactctgcttgtaaagtctgcaagtggatattcagccctctttgaggccttcgctggaaacgggtttttttcatataaggctagacagaagaattctcagtaacttccttgtgttgtgtgtattcaactcacagagttgaacgatcctttacacagagcagacttgaaacactctttttgtggaatttgcaagtggagatttcagccgctttgagttcaatggtagaataggaaatatcttccctatagaaactagacagaatgattctcagaaactcctttgtgatgtgtgcgttcaactcacagagtttaacctttcttttcatagagcagttaggaaacactctgtttgtaacgtctgcaagtggatattcagacctccttgaggccttcgttggaaacgggatttcttcatattctgctacagagaagaattcccggtaacttccttgtgttgtgtgtgttcaactcacagagttgaactttcatttacacagagcagatttgaaacactctttttgtggaatttgcaaatggagatttcaagcgctttgaggccaaaggcagaaaaggaaatatcttcgtataaaaactagacagaatcattctcagaaactgctctgcgatgtgtgcgttcaactctcagagtttaacttttcttttcattcagcagtttggaaacactctgtttgtaaagtctgcatgtggataacttgaccacttagaggccttcgttggaaacgggtttttttcctgtaaggctagacagaagagttcccagtaacttccttgtgttgtgtgcattcaactcacagagttgaacgttcccttagacagagcagatttgaaacactctatttgtgcaatttgcaagtgtagatttcaagcgctttaaggtcaatggcagaaaaggaaatatcttcgtttcaaaactagacagaatcattcccacaaactgcgttgtaatgtgtgcgttcaactcacagagtttaacctttcttttcatagagcagttaggaaacactctgtttgtaaagtctgtaagtggatattctgacatcttgtggccttcgttggaaacgggatttcttcatattctgctagacagaagaattctcagtaacttccgcgtgttgtgtgtattcaactcacacagttgaacgatcctttacacagagcagacttgaaacactctttttgtggaatttgcaagtggagatttcagccgctttgaggtcaatggtagaaaaggaaatatcttcctataaaaactagacagaatgattctcagaaactcctttgtgatgtgtgcgttcaactcacagagtttaacctttcttttcatagagcagttagaaacactctgtttgtaaagtctgcaagtggatattcagacctccttgaggccttcgttggaagcgggatttcttcatgttcaggtagacagaagaattcccagtaactttccttgtgttgtgtgtgttcaactcacagagttgaactttcatttacacagagcagatttgaaacactctttttgtggaatttgcaagaggagatttcaagcgctttgaggccaaagacagaaaaggaaatatcttcgtataaaaactagacagaatcattctcagaaactgctgcgtgatgtgtgcgttcaactctcagagtttaacttttcttttcattcatcggtttggaaacactctgtttgtaaagtctgcacgtggatattttgaccacttagaggccttcattggaaacgggttttttttcatgtaaggctagacagaagaattcccagtaacttccttgtgtggggtgcattcaactcacagagttgaacgttctcttagacagagcagatttgaaacactctatttgtgcaatttgcaagtgtagatttcaagcgctttaaggtcaatggcagaaaaggaaatatcttcgtttcaaaactagacagaatcattcccacaaactgcgttgtgatgtgttcgttcaactcacagagtttaacctttcttttcatagagcagttaggaaacagtctgtttgtcaattctgtaagtggatattctgacatcttgtggtcttcgttggaaacgggatttcttcatattctgctagacagaagaattctcagtaacttccttgtgttgtgtgtattcaactcacagagttgaaggatcctttacagagagcagacttgaaacactctttttgtggaatttgcaagtggagatttcagccgctttgaggtcaatggtagaaaaggaaatatcttcgtataaaggctagacagaatgattctcagaaactcctttgtgatgtgtgcgttcaacacacagagtttaacttttcttttcatagagaagttagtaaacactctgtttatacagtctgcatgtggatattcagacccctttgaggccttcgttggaaacgggatttcttcatattatgctagacagaagaattcccagtaactttccttgtgttgtgtgtgttcaactcacagagttgaactttgatttacacagagcagatttgaaacactctttttgtggaatttgcaagtggagatttcaagcgctttgtggccaaaggcagaaaaggaaatatcttcgtataaaaactagacagaatcattctcagaaactgctctgtgatgtgtgcgttcaactctcagagtttaacttttcttttcattcagcagtttggaaacactctgtttgtaaagtctgcacgtggataatttgaccacttagaggccttcgttggaaacgggtttttttcatgtaaggctagagagaagaattcccagtaacttccttgtgttgtgtgtattcaactcacagagttgaacgttcccttagacagagcagatttgaaacactctatttgtgcaatttgcaagtgtagatttcaagcgctttatgttcaatggcagaaaaggaaatatcttcgtttcaaaactagacagaatcattcccacaaactgcgttgtgatgtgttcgttcaactcacagagtttaacctttctgttcatagagcagttaggaaacactgtgtttgtaaagtctgtaagtggatattctgacatcttgtggccttcgttggaaaagggatttcttcatattctgctagacagaagaattctcagtaacttccttgtgttgtgtttattcaactcacagagttgaacgatcctttacacagagcagacttgaaacactctttttgtggaatttgcaagtggagatttctgccgctttgaggtcaatggtagaataggaaatatcttcctatagaaactagacagagtgattctcataaactcctttgtgatgtgtgcattcaactcacagagtttaacctttcttttcatagagcagttaggaaacactctgtttgtaaagtctgcaagtggatattcagacctccttgaggccttctttggaaacgggatttcttcatattctgatagacagaagaattcccagtaacttccttgtgttgtgtgtgttcaactcacagagttgaactttgatttacacagagcagattcgaaacactctttttgtggaatttgcaagtggagatttcaagcgctttgaggccaaaggcagaaaaggaaatatcttcgtataaaaactagacagaatcattctcagaaaatgctctgtgatgtgtacgttcaactctcagagtttaacttttcttttcattcagcagtttggaaacactctgtttgtaaagtctgcacgtggatattttgaccacttagaggccttcgttggaaacgggtttttttcatgtaagggtagacagaagaattcccagtaacttccttgtgttgtgtgcattcaactcacagagttgaacgttcccttagacagagcagatttgaaacactctatttgtgcaatttgcaagtgtagatttcaagcgctttaaggtcaacggcagaaaagggaatatcttcgtttcaaaactagacagaatcattcccacaaactgcgttgtgatgtgttcgttcaactcacagagtttaacctttctgttcatacaacagttaggaaacactctgtttgtaaagtctgcaagtggatattcagacctccttgaggccttcgttggaaacgggatttcttcatattctgctagaccgaagaattctcagtaacttccctgtgttgtgtgtattcaactcacagagttgaacgatcctttacacagagcagacttgaaacactctttttgtggaatttgcaagtggagatttcagccgctttgaggtcaatggtagaataggaaatatcttcctatagaaactagacagaatgattctcagaaactcctttgtgatgtgtgcgttcaactcacagagtttaacctttcttttcatagagcagttaggaaacactctgtttgtaaattctgcaagtggatattcagacatctttgaggctttcgttggaaacgggatttcttcatattctgctagacagaagaattctcagtaacttccttgtgttgtgtgtattcaactgacagagttgaacgatcctttacacagagcagacttgaaacactctttttgtggaatttgcaagtggagatttctgccgctttgaggtcaatggtagaataggaaatatcttcctataaaaactagacagaatcattctcagaaactgctctgtgatgtgtgcgttcaactctcagagtttaacttttcttttctttcagcagtttggaaacactctgtttgtaaagtctgcacgtggatattttgaccacttagaggcctgcgttggaaacgggtttttttcatgtaaggctagacagaagaattcccagtaacttccttgtgttgtgtacattcaactcacagagttgaacgttcccttagagagagcagatttgaaatactctttttgtgcaattggcaagtggagatttcaagcgctttaaagtcaatggcagaaaaggaaatatcttcgtttcaaaactagacagaatgattctcagaaacttcattgtgatgtgtgcgttcaactcacagagtttaacctttcttttcatagagcagttaggaaacactgtttttgtaaactctgcaagtggttattcagacctctttgaggccttcgttggaaacgggatttcttcatactgtgctagacagaagaattctcagtaacttccttgcgttgtgtgtattcaactcacagagttgaacgatcttttacagagagcagacttgaaacactctttttgtggaatttgcaagtggagatttcagccgctttgaggtcaatggtagaataggaaatatcttcctatagaaactagacagaatgattctcagaaactcctttgtgatgtgtgcgttcaactcacagagtttaacctttctgttcatagagcagttaggaaacactctgtttgtaaagtctgcaagtggatattcagacctccttgaggccttcgttggaaacaggatttcttcatattatgctagacagaagaattcccagtaacttccttgtgttgtgtgtgttcaactcacagagttgaactttgatttacaaagagcagatttgaaacactctttttgtggaatttgcaagtggagatttcaagcgctttgaggccaaaggcagaaaaggaaatatcttcgtataaaaactagacagaatcattctcagaaactgctgcgtgatgtgtgcgttcaactctcagagtttaacttttcttttcattcagcggtttggaaacactctgtttgtaaagtctgcacgtggaaattttgaccacttagaggccttcgttggaaacgggattttttcatgtaaggctagacagaagaattcccagtaacttccttgtgttgtgtacattcaactcacagagttgaacgttcccttagacagagcagatttgaaacactctttttgtgcaattggcaagtggagatttcaagcgctttgtggtcaatggcagaaaaggaaatatcttcgtttcaaaactacacagaatcattcccacaaactgcgttgtgatgtgttcgttcaactcacagagtttaacctttctgttcatagagcagttaggaaacactctgtttgtaaagtctgtaagtgggtattctgacatcttgtggccttcgttggaaacgggatttcttcatattctgctagacagaataattctcagtaacttaccttgtgttgtgtgtattcaactcacagagttgaacgatcctttacacagagcagacttgaaacactctttttgtggaatttgcaagtggagatttcagccgctttgaggtcaatggtagaataggaaatatcttcctatagaaactagacagaatgattctcagaaaatcctttgtgatgtgtgcgttcaactcacagagtttaacatttcttttcatagagcagttaggaaacactctgtttgtaaagtctgcaagtggatattcagacctctttgaggccttcgttggaaacgggatttcttcatattctgctagacagaagaattctcagtaacttccttgtgttgtgtgtattcaactgacagagttgaactttcatttagagagagcagatttgaaacactgtttttgtggaatttgcaagtggtgatttcaagcgctttggggccaaaggcagaaaaggaaatatcttcgtataaaaactagacagaatgattctcagaaactgctctgcgatgtgtgcgttcaactctcagagtttaacttttcttttcattcagcagtttggaaacactctgtttgtaaagtctgcacgtggatattttgaccacttagaggccttcgttggaaacgggtttttttcctgtaaggctagacagaagaattcccagtaacttccttgtgttgtgtgcattcaactcacagagttgaacgttcccttagacagagcagatttgaaacactctatttgtgcaatttgcaagtgtagatttcaagcgctttaaggtcaatggcagaaaaggaaatatcttcgtataaaaactagtcagaatcattcccacaaactgcgttgtgatgtgttcgttcaactcacagagtttaacctttcttttcatagagcagttaggaaacagtctgtttgtcaattctgtaagtggatattctgacatcttgtggccttcgttggaaacgggttttcttcatattctcctagacagaagaattctcagtaacttccttgtgttgtgtttattcaactcacagagttgaatgatcctttacacagagcagacttgaaactctctttttgtggaatttgcaagtggagatttcagccgctttgaggtcaatggtagaaaagcaaatatcttcgtataaagactagacagagtgattctcagaaactcctttgtgatgtctgcgtttaactcacagagtttaacctttcttttcatagagcagttaggaaacactctgtttgtaaagtctgcaagtggatattcagacctccttgaggccttcgttggaaacgggatttcttcatattatgctagacacaagaattctcagtaacttccttgtgttgtgtgtattcaactgacagagttgaactttcatttagagagagcagatttgaaacactgtttttgtggaatttgcaagtggagattttaagcgctttggggccaaaggcagaaaaggatatatcttcgtataaaaactagacagaatcattctcagaaactgctgcgtgatgtgtgcattcaactctcagagtttaacttttcttttcattcagcggtttggaaacactctgtttgtaaagtctgcacgtggaaattttgaccacttagaggccttcgttggaaacgtgtttttttcatgtaaggctagacagaagaattcccagtaacttccttgtgttgtgtgcattcaactcacagagttgaacgttcccttagacagagcagatttgaaacactctatttgtgcaatttgcaagtgtagttttcaagctctttaaggtcaacggcagaaaaggaaatatcttcgtttcaaaactagacagaatcattcccacaaactgcgttgtgatgtgttcgttcaactcacagagtttaaactttcttttcatagagcagttaggaaacagtctgtttgtcaattctgtaagtggatattctgacatctagtggccttcgttggaaacgggatttcttcatattctgctagacagaagaattctcagtaacttccttgtgttgtgtgtattcaactcacagagttgaacgatcgtttacacagagcaatcatgaaacactctttttgtggaatttgcaagtggagatttctgccgctttgaggtcaatggtggaataggaaatatcttcctatagaaactagacagaatgattctcagaaactcctttgtgaagtgtgcgttcaactcacagagtttaacctttcttttcatagagcagttaggaaacactctgtttgtaaagtctgcaagtggatattcagacctctttgaggccttcgttggaaacgggtttttttcatataaggctagacagaagaattcccagtaacttccttgtgttgtgtgtgttcgactcacagagttgaactttcatttacacagagcagatttgaaacactctttttgtggaatttgcaagtggagatttcaagcgctttgaggcccaaggcagaaaaggaaatatcttcgtttcaaaactagacagaatcattctcagaaactgctctgcgatgtgtgcgttcaactctcagagtttaacttttcttttcattcagcagtttggaaacactctgtttgtaaagtctgcacgtggataatttgaccacttagaggccttcgttggaaacgggttttttcatgtaaggctagacagaagaattcccagtaacttccttgtgttgtgtacattcaactcacagagttgaacgttcccttagacagagcagatttgaaacactctttttgtgcaattggcaagtggagatttcaagtgctttaaggtcaatggcagaaaaggaaatatcttcgtttcaaaactagacagaatcattcccacaaactgcgttgtgatgtgttcgttcaactcacagagtttaacctttcttttcatagagcagttaggaaacagtctgtttgtaaattctgtatgtggatattctgacatcttgtggccttcgttgcaaacgggatttcttcatattctgcttgacagaagaaatctcagaatcttccttgtgttgtgtgtattcaactcacagagttgaacgatggtttacaaagagcagatatgaaacactctatttgtggaatttgcaagtggagatttcagccgctttgaggtccatggtagaaaaggaaatatcttcgtataaaaactagacagaaagattctcagaaattcctttgtgatgtgtgcgttcaactcacagagtttaacctttcttttcatagagcagttaggaaacactctgtttgtaaagtctgcaagtggatattcagacctctttgaggccttcgttggaaacgggtttttttcatataaggctagacagaagaattctcagtaacttccttgtgttgtgtgtattcaactgacagagttgaactttcatttagagagagcagatttgaaacactgtttttgtggaatttgcaagtggagatttcaagcgctttggggccaaaggcagaaaacgaaatatcttcttataaaaactagacagaatcattctcagcaaactcctttgtgatgtgtgcgttcaactctcagaatttaacttttcttttcattcagcggtttggaaacactctgtttgtaaagtctgcacgtggaaattttgaccacttaggggccttcgttggaaacgggtttttttcatgtaaggctagacagaagaattcccagtaacttccttgtgttgtgtgcattcaactcacagagttgaaagttcccttagacagaccagatttgaaacactctatttgtgcaatttgcaagtgtagatttcatgcgctttgaggtcaatggcagaaaaggaaatatcttcgtttcaaaactagacagaatcattcccacaaactgcgttgtgatgtgttcgttcaactcacagagtttaacctttctgttcatagagcagttaggaaacactctgtttgtaaagtctgcaagtggatattcagacctccttgaggccttcgttggaaacgggatttcttcatattctgctagaccgaagaattctcagtaacttccttgtgttgtgtgtattcaactcacagagttgaacgatcctttacacagagcagacttgaaacactctttttgtggaatttgcaaggggagatttcagccgctttgaggtcaatggtagaaaaggaaatatcttcgtataaaaactagacagaatgattctcagaaacttcattgtgatgtgtgcgttcaactcacagagtttaacctttcttttcatagagcagttaggaaacactctgtttgtgaactctgcaagtggatattcagacgtctttgaggccttcgttggaaacgggatttcttcatactatgctagacagaagaattctcagtaacttcccttgtgttgtgtgtattcaactcacagagctgaactttcatttacacagagcagatttgaaacactctttttgtggaatttgcaaatggagatttcaagcgctttgaggccaaaggcagaaaaggaaatatcttcgtataaaaactagacagaatcattctcagaaactgctctgcgatgtgtgcgttcaactctcagagtttaacttttcttttcattcagcagtttggaaacactctgtttgtaaagtctgcacgtggatattttgaccacttagaggcctttgttggaaacgggttttttcctgtaaggctagacagaagaattcccagtaacttccttgtgttgtgtacggttcaactcacagagttgaacgttcccttagacagagcagatttgaaacactctttttgtgcaattggcaagtggagatttcaagcgctttaaggtcaatggcagaaaaggaaatatcttcgtttcaaaactagacagaatgattctcagaaacttctttgtgatgtgtgcgttcaactcacagagtttaacctttcttttcatagagcagttaggaaacactctgtttgtaaagtctgcaagtggatattcagatctctttgaggccttcgttggaaatgggatttcttcatactatgctagacagaagaattctcagtaacttccttgtgttgtgtgtattcaactcacagagttgaacgatcctttacacagagcagacttgtaacactctttttgtggaatttgcaagtggagatttcagccgctttgaagtcaaaggtagaaaaggaaatatcttcctataaaaaatagactgaatgattctcataaactcctttgtgatgtgtgcgttcaactcacagagtttaacctttcttttcatagagcagttaggaaacactctgtttgtaaagtctgcaagtggatattcagacctccttgaggccttcgttggaaaagggatttcttcatattctgctagacagaagaattctcagtaacttccttgtgttgtgtgtattcaactcacagagttgaacgatcctttacacagagcagacttgaaacactctttttgtggaatttgcaagtggagatttcagcccgctttgaggtcaatggttgaaaaggaaatatcttcgtataataaactagacagaatcattctcagaatctgctgcgtgatgtgtgcattcaactctcagagtttaacttttcttttcattcagcggtttggaaacactctgtttgtaaagtctgcacgtggatattttgaccacttagaagccttctttggaaacgggttttcttcatgtaaggctagacagaagaattcccagtaacttccttgtgttgtgttcattcaactcacagagttgaacgttcccttagacagagcagatttgaaacactctttttgtgcaattggcaagtggagatttcaagcgctttaaggtcaatggcagaaaaggaaatatcttcgtttcaaaactagacagaatcattcccacaaactgcgttgtgatgtgttcgttcaactcacagagtttaacctttcttttcatagagcagttaggaaacagtctgtttgtaaattctgtaagtggatattctgacatcttgtggccttcgttggaaacgggatttcttcatattctgctagtcagaagaattctcagtaacttccttgtgtagtgtgtattcaactcacagagttgaacgatcctttacacagagcagacttgaaacactctttttgtggaatttgcaagtggagatttcagccgctttgaggtcaatggtagaaaaggaaatatcttcgtataaagactagacagaatgattctcagaaactcctttgtgatgtgtgcgttcaactcacagagtttaacttttcttttcatagagcagttaggaaacactctgtttgtaaagtctgcaagtggatattcagacctctttgaggccttcgttggaaacgggatttcttcatattatggtagacagaagaattctcagtaacttccttgtgttgtgtgtattcaactcacagagttgaacgatcctttacacagagcagacgtgaaacactctttttgtggaatttgcaagtggagatttcagccgctttgaggtcaatagtagaaaaggaaatatcttcgtagaaaaactagacagaatcattctcagaaactgctctgcgatgtgtgcgttcaactctcagagtttaacttttcttctcattcagcagtttggaaacactctgtttgtaaagtctgcacgtggatattttgaccacttagaggccttcgttggaaacgggtttttttcctgtaaggctagacagaatcattctcagaaactgctctgcgatgtgtgcattcaactctcagagtttaacttttcttttcattcagcagtgtggaaacactctgtttgtaaagtctgcacgtggatattttgaccacttagaggccttcgttggaaacgggtttttttcctgtaaggctagacagaagaattctcagtaacttccttgtgttgtgtgtattcaactcacagagttgaacgacgctttacagagagcagacttgaaacactctttttgtggaatttgcaagtggagatttcagccgcttgaggtcaatggtagaaaaggaaactatcttcgtataaagactagacagaatgattctcagaaactcctttgtgatgtgtgtgttcaactcacagagttgaacctttcttttcatagagcagttagtaaacaatctgtttataaagtctgcaagtggatattcagatccctttgaggccttcgttggaaacgggatttcttcatattatgctagacagaagaattctcagtaacttccttgtgttgtgtgtattcaactgacagagttgaactttcgtttagagagagcagatttgaaacactgtttttgtggaatttgcaagtggagatttcaagcgctttggggccaaaggcagaaaaggaaatatcttcgtataaaaactagacagaatcattctcagaaactgctctgcgatgtgtgcgttcaactcttagagtttaacttttcttttcattcagcagtttggaaacactctgtttggaaagtctgcacgtggataatttgaccacatagaggccttcgttggaaacgggtttttttcatgtaaggctagacagaagaattcccagtaacttccttgtgttgtgtacattcaactcacagagttgagacgttcccttagaccgagcagatttgaaacactctttttgtgcaattggcaagtggagatttcaagcgctttaaggtcaatggcagaaaaggaaatatcttcgtttcaaaactagacagaatgattctcataaactcctttgtgatgtgtgcgttcaactcacagagtttaacctttcttttcatagagcagttagtaaacactctgtttggaaagtctgcaagtggatattcagacctctttgaggccttcgttggaaacgggatttcttcatattctgctagacagaagaattctcagtaacttcccttgtgttgtgtgtattcaactcacagagttgaacgatcctttacacagagcagacttgaaacactctttttgtggaatttgcaagtggagatttcagccgctttgaggtcaatagtagaaaaggaaatatcttcgtagaaaaactagacagaatgattctcagaaactcctttgtgatgtgtgcgttcaactcacagagtttaacctttcttttcatagagcagttaggaaacactctgtttgtaaagtctgcaagtggatattcagacctccttgaggccttcgtttgaaacgggatttcttcatattatgcaagacagaagaattcccagtaacttcttgtgttgtgtgtgttcaactcacagagttgaactttcatttacccagagcagatttgaaacactctttttgtggaatttgcaagtggagatttcaagcgctttgaggccaaaggcagaaaaggaaatatcttcgtttcaaaactagacagaatcattctcagaaactgctgcgtgatgtgtgcgttcaactctcagagtttaacttttcttttcattcagcggtttggaaacactctgtttgtaaagtctgcacgtggatattttgaccacttataggccttcgttggaaacgggtttttttcatgtaaggctagacagaagaattctcagtaactaccttgtgttgtgtgtattcaactcacagagttgaacgatcctttacacagagcagacttgaaacactctatttgtgcaatttgcaagtgtagatttcaagcgctttaaggtcaatggcagaaaaggaaatatcttcgttttaaaactagacagaatcattcccacaaactgcgttgtgatgtgttcgttcaactcacagagtttaacctttctgttcatagagcagttaggaaacactctgtttgtaaagtctgtaagtggatatcctgacatcttgtggccttcgttggaaacgggatttcttcatattctgctagacagaagaattctcagtaacttccttgtgttgtgtgtattgaactcacagagttgaacgatcctttacacagagcagacttgaaacactctttttgtggaatttgcaagtggagatttcagccgctttgaggtcaatggtagaataggaaatatcttcctatagaaactagacagaatgattctcagaaagtcctttgtgatgtgtttgttcaactcacagagtttaacctttcttttcatagagcagttaggaaacactctgtttgtaaagtctgcaagtggatattcagacctctttgaggacttcgttggaaacgggatttcttcatattctgctagacagaagaattcccagtaacttccttgtgttgtgtgtgttcaactcacagagttgaactttcatttacacagagcagatttgaaacactctttttgaggaatttgcaagtggagatgtcaagcgctttgaggccaaaggcagaaaaggaaatatcttcgtttcaaaattagacagaatcattcccacaaactgcgttgtgatgtgttcgttcaactcacagagtttaatctttcttttcatagagcagttaggaaacactctgttggtaaattatgtaagtggatattctgacatcttgtggcctccgttggaaacgggatttcttcatattctgctagacagaagaattctcagaatcttccttgtgttgtgtgtattcaactcacagagttgaacgatcctttacacagagcagacttgaaacactctttttatggaatttgcaagtggagatttcagccgctttgaggtcaatggtagaaaaggaaatatcttcgtataaaaactagacagaatcattctcagaaactgctctgcgatgtgtgcgttcaactctcagagtttaatttttcttttcattcagcagtttggaaacactctctttgtaaagtctgcacgtggatattttgaccacttagaggccttcgttggaaacgggttttattcctgtaaggctagacagaagaattcccagtaacttccttgtgttgtgtgcagtcaactcacagagatgaacgttccctttgacagagcagatttgaaacactctatttgtgcaatttgcaagtgtagatttcaagcgctttaaggtcaatggcagaaaaggaaatattttcgtttcaaaactagacagaatcattcccacaaactgcgttgtgatgtgttcattcaactcacagagtttaaccattcttttcatagagcggttaggaaacactctgtttataaagtctgcaagtggatattcagaccttttgaggccttcgttggaaacgggatttcttcatatgatgctagacagaagaattcccagtaacttccttgtgttgtgtgtgttcaactcacagagttgaaatttcatttacacagagcagacttgtaacactctttttgtggaatttgcaagtggagatttcagccgctttgaagtcaaaggtagaaaaggaaatatcttcgtataaaaactagacagaatgattctcagaaactcctttgtgatgtgtgcgttcaactctcagagttcaacttttcttttcattcagcagtttggaaacactctgtttgtaaagtctgcacgtggatattttgaccacttagaggccttcgttggaaacgggtttttttcctgtaaggctagacagaagaattcccagtaacttcccttgttttgtgtacattcaactcacagagttgaacgttcccttagatagagcagatttgaaacactctttttgtgcaattggctagtggtgatttcagccgctttgaggtcaatggtagaaaaggaaatatcttcgtataaaaactagacagaatcattcccacaaactgcgttgtgatgtgttcgttcaactcacagagtttaacctttctgttcatagagcagttaggaaacactctgtttgtaaagtctgcaagtggatattcagacctccttgaggccttcgttggaaatgggatttcttcatattctgctagacagaataattctcagtaacttccttgtgttgtgtgtattcaactcacagagttgaaggatcctttacagcgaacaggcttgaaacactctttttgtcgaatttgcaagtggagatttcagccgctttgaggtcaatggtagaataggaaatatcttcttatagaaactagacaaaatgattctcagaaacttctttgtgatgtgtgcgttcaactcacagagtttaacctttcttttcatagagcagttaggaaacactctgtttgtaaactctgcaagtggatattcagacctctttgaggccttcattggaaacgggatttctccatactatgctagacagaagaattctcagtaacttccttgtgttgtgtgtattcaactcacagagttgaacgatcctttacacagagcagacttgaaacactctttttgtggaatttgcaagtggagatttcaaccgctttgaggtcaatggtagaaaaggaaatatcttcgtataaagactagacagaatgattctcataaactcctttgtgatgtgtgcggtcaactcacagagtttaacttttcttttcatagagcagttaggaaacactctgtttgtaaagtgtgcaagtggatattcagacctctttgaggccttcgttggaaacaggatttcttcatattatgctagacagaagaattcccaggaacttccttgtgttgtgtacattcaactcacagagttgaacgttcccttagacagagcagatttgaaacgctctttttgtgcaattggcaagtggtgatttcagcctctttgaggtcaatggtagaaaaggaaatatcttcgtataaaaactagacagaatcattcccacaaactgcgttgtgatgtgttcgttcaactcacagagtttaacctttcttttcatagagcagttaggaaacactctgttggtaaaatctgtaagtggatattctgacatcttgtggccttcgttggaaacgggatttcttcatattctgctagacagaagaattctcagaaacttccttgtgttgtgtgtattcaactcatagagttgaacgatcgtttacacagagcagacttgagaaattctttttgtggaatttgcaagtggagatttcagccgctttgaggtcaatggtagaaaaggaaatatcttcatataaaaactagacagaatgattctcagaaactcctttgtgatgtgtgagttcaactcacagagtttaacctttcttttcatagagcagttaggaaacactctgtttgtaaagtctgcaagtggatattcagacctctttgaggccttcgttggaaacgggatttcttcatattctgctgagacagaagaattctcagtaacttccttgttttgtgtgtattcaactcacagttaaacgatcctttacacagagcagacttgaaacactctttttgtggaatttgcaagtggagatttcagccgctttgaggtcaatagtagaaaaggaaatatcttcgtagaaaaactagacagaatcattctcagaaactgctctgtgatgtgtgcgttcaactctcagagtttaacttttcttttcattcagcagtttggaaacactctgtttgtaaagtctgcatgtggatattttgagcacttggaggccttcgttggaaacgggtttttttcatgtaaggctagacaggagaattcccagtaacttccttgtgttgtgtgcattcaactcacagagttgaacgttccgttagacagagcagatttgaaatactctatttgtgcaatttgcaactgtagatttcaagcgttttaaggtcaatggcagaaaaggaaatatcttcgtataaaaactagtcagaatcattcccacaaactgcgttgtgatgtgttcgttcaactcacagagtttaacctttcttttcatagagcagttaggaaacactctgttggtaaattctgtaagtggatattctgacatcttgtggcctccgttggaaacgggatttcttcatattctgctagacagaataattctcagtaacttccttgtgttgtgtgtattcaactcacagagttgaacgatcctttacagagagcagacttgaaacacgctttttgtggaatttgcaagtggagatttcagccgctttgaggtcaatggtagaataggaaatatcttcctatagaaacaagacagaatgattctcagaaactcctttgtgatgtttgcgttcaactgacagagtttaacctttcttttcatagagcagttaggaaacactctgtttgtaaagtctgcaagtggatattcagacctctttgagtccttcgttggaaacgggatttcttcatattctgctagacagaagaattcccagcaacttccttgtgttgtgtgtgttcaactcacagagttgaactttcatttacacagagcagatttgaaacactctttttgtggaatttgcaagtggagatttcaagcgctttgaggccaaaggcagaaaaggaaatatcttcgtataaaaactagacagaatcattctcagaaactgctgcgtgatgtgtgcgttcaactctcagagtttaacttctcttttcattcagcggtttggaaacactctgtttgtaaagtctgcacgtggatattttgaccacttagaggccttcgttggaaacgggtttttttcatgtaaggctagacagaagaattcccagtaacttccttgtgttgtgtgcattcaactcacagagttgaacgttcccttagacagagcagatttgaaacactctatttgtgcaatttgcaagtgtagatttcaagcgctttaaggtcaatggcagaaaaggaaatatcttcgtttcaaaactagacagaatcattcccacaagctgcgttgtgatgtgttcgttcaactcacagagtttaacctttctgttcatagagcagttaggaaacactctgtttgtaaagtctgtaagtggatattctgacatcttgtggccttcgttgcaaacgggatttcttcatattctgctagacagaagaattctcagtaacttccttgtattgtgagtattcaactcacagagttaaacgatcctttacacagagcagacttgaaacactctttttgtggaatttgcaagtggagaattcagccgctttgaggtcaatggtagaatagtaaatatcttcctatagaaaattgacagaatgattctcagaaactcctttgtgatgtgtgcgttcaactcacagagtttaacctttcttttcatagagcagttaggaaacactctgtttgtaaagtctccaagtggatattcagacctctttgaggccttcgttggatacgtgtttttttcatataaggctagacagaagaattcccagtaacttccttgtgatgtgtgtgttcaactcacagagttgaactttcatttacacagagcagatttgaaacactctttttgtggaatttgcaagtggagatttcaagcgctttgaggccaaaggcagaaaaggaaatatcttcgtttcaaaactagacagaatcattctcagaaactgctctgcgatgtgtgcgttcaactctcagagtttaacttttcttttcattcagcagtttggaaacactgtgtaaagtctgcacgtggataatttgaccacttagaggccttcgttggaaacgggtttttttcatgtaaggctagacagaagaattcccagtaacttccttgtgttgtgtgcattcaactcacagagttgaacgttcccttagacagagcagatttgaaacactctatttgtgcaatttgcaagtgtagatttcaagcggtttaaggtcaacgccagaaaaggaaatatcttcgtttcaaaactagacagaatcattcccacaaactgcgttgtgatgtgttcgttcaactcacagagtttaaactttctgttcatagagcagttaggaaacactctgtttttaaagtctgccagtggatattcagacctctttgaggccttcgttggaaacgggatttcttcatattctgctagacagaagaattctcagaaacttccttgtgttctgtgttttcaactcacagagttgaacgatgctttacacagagtagacttgaaacactcttgtggaatttgcaagtggagatttcatccgctttgaggtcaatggtagaataggaaatatcttcctatagaaactagacagaatgattctcagaaactcctttgagatgtgtgcgttcaactcacagagtttaacctttcttttcatagagcagttaggaaacactctgtttgtaaagtctgcaagtggatattcagacctctttgaggccttcgttggaaacgggatttcttcatattcttctagagagaagaattcccagtaacttccttgtgttgtgtgtgttcaactcacagagttgaactttcatttacacagagcagatttgaaacactctttttgtggaatttgcaagtggagatttcaagcgctttgaggccaaaagcagaaaaggaaatatcttcgtataaaaactagacagaaatcattctcagaaactgctctgcgatgtgtgcgttcaactctcagagtttaacttttcttttcattcagcagtttggaaacactctgtttgtaaagtctgcacgtggatattttgaccacttagaggccttcgttggaaacgggtttttttcctgtaaggctagacagaagaattcccagtaccttccttgtgttgtgtacattccactcacagagttgaacgttcccttagacagagcagatttgaaacactctttttgtgcaattggcaagtggagatttcaagcgctttaaggtcaatggcagaaaaggaaatatcttcgtttcaaaactagacagaatcattcccacaaactgcgttctgatgtgttcgttcaactcacagagtttaacctttctgttcatagagcagttaggaaacactctgtttgtaaagtctgtaagtggatattctgacatcttgtggccttcgttggaaacgggatttcttcatattctgctagacagaagaattctcagtaacttcccttgtgttgtgtgtattcaactcacagagttgtacgatcctttacacagagcagacttgaaacactctttttgtggaatttgcaagtggagatttcagccgctttgaggtcaatggtagaataggaaatatcttcctatagaaacgagacagaatgattctcagaaactcctttgtgatgtgtgcgttcaactcacagagtttaacctttcttttcatagagcagttaggaaacactctgtttgtaaagtctgcaagtggatattcagacatccttgaggctttcgttggaaacgggatttcttcatattctgcaagaaagaagaattctcagtaacttccgcgtgttgtgtgtattcaactcagagagttgaacgatcctttacacagagcagacttgaaacaccctttttgtggaatttgcaagtggagatttcagccgctttgtggtcaatggtacaaaaggaaatatcttcctataaaaactagacagaatcattctcagaaactgctgcgtgatgtgtgcgatcaactctcagagtttaacttttcttttcattcagcggtttggaaacactctgtttgtaaagtctgcacgtggaaattttgacaacttagagaccttcgttggaaacgggattttttcatgtaaggctagacagaagaattcccagtaacttccttgtgttgtgtgcattcaactcacagagttgaacgttcccttagacagagcagatttgaaacactctatttgtgcaatatgcaagtgtagttttcaagctctttaaggtcaacggcagaaaaggaaatatcttggtttcaaaactagacagaatgattctcagaaactcctttgtgatgtgtgcgttcaactcacagagtttaccctttcttttcatagagcagttaggaaacactctgtttgtaaagtctgcaagtggatattcagacatccttgaggcgttcgttggaaacgggatttcttcatattctgccagaaagaagaattctcagtaacttccttgtgttgtgtgtattcaactcacagagttgaacgatccattacacagagcagacttgagacactctttttgtggaatttgcaagtggagatttcagccgctttgaggtcaatggtagaaaaggaaatatcttcgtataaagactagacagaatgattctcagaaaatcttttgtgatgtgtgcgttcaactcacagagtttaacttttcttctcatagagcagttaggaaacactctgtttgtaaagtctgcaagtggatattagacctctttgaggccttcgttggaaacgggatttcttcatattatgctagacagaagaaatcccagtaacttccttgtgttgtgtgttttttaagtcacagagttgaactttcatttacacagagcagatttgaaacactctttttgtggaatttgcaagtggagatttcaagtgctttgaggccaatggcagaaaaggaaatatcttcgtataaaaactagacagaatcattctcagaaactgctctgtgatgtgttcgttcaactctcagagtttaacttttcttttcattcagcagtttggaaacactctgtttgtaaagtctgcacgtggataatttgaccacttagaggccttcattggaaacgggtttttttcatgtaaggctagacagaagaattcccagtaacttctttgtgttgtgtacattcaactcacagagttgaacgttcccttagacagagcagacttgtaacagtctttttgtggaatttgcaagtggagatttcagccgctttgaagtcaaaggtagaaaaggaaatatcttcctataaaaactagacagaatcattcccacaaactgcgttgtgatgtgttcgttcaactcacagagtttaacctttcttttcgtagagcagttaggaaacactctgtttgtaaagtctgcaagtggatattcagacctctttgaggccttcgttggaaacgggatttcttcatattctgctagacagaataattctcagtaacttccttgtgttgtgtgtattcaactcacagagttgaacgatcctttacagagagcagacttgaaacactctttttgtggaatttgcaagtggagatttcagccgctttgaggtcaatagtagaataggaaatatcttcgtagaaaaactagacagaatgtttctcagaaactcctttgagatgtgtgtgttcaactcacagagtttaacctttcttttcatagagcagttaggaatcactctgtttgtaaagtctgcaagtggatattcagacctctttgaggccttcgttggaaacgggtttttttcatataaggctagacagaagaattcccagtaacttccttgtgttgtgtgtgttcaactcacagagctgaactttcatttaaacagagcagatttgaaacactctttttgtggaatttgcaagtggagatttcaagcgctttaaggccaaaggcagaaaaggaaatatcttcgtataaaaactagacagagtgattctcagaaactcctttgtgatgtgtgcgttcaactcacagagtttaacctttcttttcattcagcggtttggaaacactctgtttgtaaagtctgcacgtggatattcagacctctttgaggccttcgttggaaacgggtttttttcatgtaaggctagacagaagaattcccagtaacttccttgtgttgtgtgcattcaactcacagagttgaacgttccttagagagagcagatttgaaacactctatttgtgcaatttgcaagtgtagatttcaagcgctttaaggtcaatggcagaaaaggaaatatcttcgtttcaaaactagacagaatgattctcagaaactcctttgtgatgtgtgcgtttaactcacagagtttaacctttcttttcatagagcagttaggaaacactctgtttgtaaagtctgcaagtggatattcagacctccttgaggccttcgttggaaacgggatttcttcatattatgctagacagaagaattctcagtaacttccttgtgttgtgtgtattcaactcacagcagttgaacgatcctttacacagagcagacttgaaacactctttttgtggaatttgcaagtggagatttcagccgctttgagttcaatggtagaataggaaatatcttcctatagaaactagacagaatgattctcagaaactcctttgtgatgtgtgcgttcaactcacagagtttaacctttcttttcatagagcagttaggaaaaactgtgtttgtaatgtctgcaagtggatattcagacatctttgaggctttcgttggaaacgggatttcttcatattatgctagacagaagaattcccagtaacttccttgtattgtgtgtgttcaactcacagagttgaactttcatttacccagagcagatttgaaacactctttttgtggaatttgcaagtggagatttcaagcgctttgaggccaaaggcagaaaaggaaatatcttcgtttcaaaactagacagaatcattctcagaaactgctctgcgatgtgtgcgttcaactcacagagtttaacctttcttttcatagagcagttaggaaacactctgtttgtaaagtctgcaagtggatattcagacctctttgaggccttcgttggaaacgggatttcttcatataaggctagacagaagaattctcagtaacttccttgtgttgtgtacattcaactcacagagttgaacgttcccttagacagagcagacttgtaacactctttttgtggaatttgcaagtggagatttcagccgctttcaagtcaaaggtagaaaaggaaatatcttcctataaaaactagacagaatcattcccacaaactgcgttgtgatgtgttcgttcaactcacagagtttaacctttcttttcatagagcagttaggaaacactctgttggtaaattctgtaagtggatattctgacatcttgtggccttcgttggaaacgggatttcttcatattctgctagacagaagaattctcagtaacttccttgtgttgtgtgtattcaactcacagagttgaacgatcctttacacagagcagacttgaaacactctttttgtagaatttgcaagtggagatttcagccgctttgaggtcaatggtagaaaaggaaactatcttcatataaagactagacagaatgattctcagaaactcatttgtgatgtgtgcgttcaactcacagagtttaacctttcttttcatagagcagttaggaaacactctgtttttaaagtctgcaagtggatattcagacctttttgaggccttcgttggaaacgggatttcttcatatgatgctagacagaagaattcccagtaacttccttgtgttgtgtgtattcaactcacagagttgaactttcatttacacagagcagatttgaaacactctttttgtggaattttcaaatggagatttcaagcgctttgaggccaaaggcagaaaaggaaatatcttcgtataaaaactagacagaatcattctcagaaactgctctgcgatgtgtgcgttcaactctcagagtttaacttttcttttcattcagcagtttggaaacactctgtttgtaaagtctgcacgtggatattttgaccacttagaggccttcgttggaaacgggtttttttcatggaaggctagacagaagaattctcagtaacttccttgtgttgtgtgtattcaactcacagagttgaacgatcctttacacagagcagacttgtaacactctttttgtggaatttgcaagtggagatttcagccgctttgaagtcaaatgtagaaaaggaaatatcttcctttaaaaactagacagaatcattcccacaaagtgcgttgtgatgtgttcgttcaactcacagagtttaacctttctgttcatagagcagttaggaaacactctgtgtgtaaagtctgcaagtggatattcagacctctttgaggccttcgttggaaacgggatttcttcatattctgctagacagaagaattctcagaaacttccttgtgttgtgtgttttcaactcacagagttcaacgatcctttacacagagcagacttgaaacactctttttgtggaatttgcaagtggagatttcagccgctttgaggtcaatggtagaataggaaatatcttcctatagaacctagacagaatgattctcagaaaatcttttgtgatgtgtgcgttcaactcacagagtttaacttttcttctcatagagcagttaggaaacactctgtttgtaaagtctgcaagtggatattcagacctctttgaggccttcgttggaaacgggatttcttcatattttgctagacagaagaattcccagtaacttccttgtgttgtgtgtgttcaactcacagagttgaactttcatttacacagagcagatttgaaacactctttttgtggaatttgcaagtggagatttcaagcgctgtgaagccaaaggcagaaaaggaaatatcttcgtataaaaactagacagaaatcattctcagaaactgctctgcgatgtgtgcgttcaactctcagagtttaacttttcttttcattcagcagtttggaaacactctgtttgtaaagtctgcacgtggatattttgaccacttagagtccttcgttggaaacgggtttttttcatgtaaggctagacagaagaattcccagtaacttcccttgtgttgtgtacattcaactcacagagttgaacgttcccttagacagagcagatttgaaacactctttttgtgcaattggcaagtggagatttcaagcgctttaaggtcaatggcagaaaaggaaatatcttcgtttcaaaactagagagaatgattctcagaaactcctttgtgatgtgtgcgttcaacacacagagtttaacttttcttttcatagagcagttaggaaacactctgtttgtaaagtctgcaagtggatattcagacctccttgacgccttcgttggaaacgggatttcttcatattctgctagacagaagaattctcagtaacttccttgtgttgtgtgtattcaactcacagacttgaacgatcctttacacagagcagacttgaaacactctttttgtggaatttgcaagtggagatttcagccgctttgaggtcaatagtagaaaaggaaatatcttcgtagaaaaactagacagaatgattctcagaaactcctttgtgatgtgtgcgttcaactcacagagtttaaactttcttttcatagagcagttaggaaacactctgtttgtaaagtctgcaagtggatattcagacctccttgaggccttcgttggaaacgggatttcttcatattatgctagacagaagaattctcagtaacttccttgtgttctgtgtattcaactgacagagttgaactttcatttagagagagcagatttgaaacactgtttttgtggaatttgcaagtggagatttcaagcgctttggggccaaaggcagaaaaggaaatatcttcgtataaaaactagacagaatcattctcagaaactgctctgcgatgtgtgcgttcaactctcagagtttaacttttcttttcattcagcagtttggaaacactctgtttgtaaagtctgcacgtggatattttgatcacttagaggccttcgttggaaacgggtttttttcctgtaaggctagacagaagaattaccagtaacttccttgtgttgtgtacattcaactcacagagttgaacgttcccttagacagagcagatttgaaacactctttttgtgcaattggcaagtggtgatttcagccgctttgaggtcaatggtagaaaaggaaatatcttcgtataaaaactagacagaatcattcccacaaactgcgttgtgatgtgttcgttcaactcacagagtttaacctttctgttcatagagcagttaggaaacactgtgtaaagtctgttagtggatattctgacatcttgtggccttcgttggaaacgggatttcttcatattctgctagacagaagaattctcagtaacttccttgtgttgtgtgtattcaactcacagagttgaacgatcctttacacagagcagacttgaaacactctttttgtggaatttgcaagtggagatttcagccactttgaggtcaatggtagaaaaggaaatatcttcgtataaagactagacagaatgattctcagaaactcctttgtgatgtgtacgttcaactcacagagtttaacctttcttttcatagagcagtgaggaaacactctgtttgtaaagtctgcaagtggatattgagacctctttgaggccttcgttggaaacgggtttttttcatataaggctagacagaagaattcccagtaacttccttgtgttgtgtgtgttcaactcacaggagttgaactttcatttacccagagcagatttgaaacactctttttgtggaatttgcaagtggagatttcaagcgctttgaggccaaaggcagaaaaggaaatatcttcgtttcaaaactagacagaatcattctcagaaactgctgcgtgatgtgtgcgttcaactctcagactttaacttttcttttcattcagcggtttggaaacactctgtttgtaaagtctgcatgtggatattttgaccacttagaggccttcgttggaaacgggtttttttcatgtaaggcaagacagaagaattcccagtaacttccttgtgttgtgtacattcaactcacagagttgaacgtttccttagacacagcagatttgaaacactgtttttgtgcaattggcaagtggtgatttcagccgctttgaggtcaatggtataaaaggaaatatcttcatataaaaactagacagaatgattctcagaaactcctttgtgatgtgtgcgttcaactcacagagtttaacctttcttttcatagagcagttaggaaacactctgtttataaagtctgcaagtggatattcagacccctttgaggccttcgttggaaacgggatttcttcatattatgctagacagaagaattctcaataacttccttgtgttgtgtgtattcaactcacagagttcaacgatcctttacacagagcagacttgaaacactcttgttgtggaatttgcaagtggagatttcagccgctttgaggtcaatggtagaataggaaatatcttcctataaaaactagacagaatgattctcagaaactgctttgtgatgtgtgtgttcaactcacagagtttaacgtttcttttcatagagcagttagtaaacactctgtttataaagtctgcaagtggatattcagacccctttgaggccttcgttggaaacgggatttcttcatattatgctagacagaagaattctcagtaacttccttgtgttgtgtgtattcaactgacagagttaaactttcatttagagagagcagatttgaaacactgtttttgtggaatttgcaagtggagatttcaagcgctttggggccaaaggcagaaaaggaaatatcttcgtataaaaactagacagaatcattctcagaaactgctctgcgatgtgtgcgttcaactctcagagtttaacttttcttttcattcagcagtttggaaacagtctgtttgtaaagtctgcacgtggatattttgaccacttagaggccttcgttggaaacgggtttctttcatgtaaggctagacagaagaattcccagtaacttccttgtgttgtgtgcattcaactcacagagatgaacgttcccttagacagagcagatttgaaacactctatttgtgcaatttgcaagtgtagatttcaagcgctttaaggtcaatggctgaaaaggaaatatcttcgtttcaaaactagacagaatcattcccacagactgcgttgtgatgtgttcgttcaactcacagagtttaacctttcttttcatagagcagttaggaaacactctgttggtaaattctgtaagtggatattctgacatcttgtggcctccgttggaaacgggatctcttcatattctgctagacagaagaattctcagtaacttccttgtgttgtgtgtattcaactcacagagttgaacgatcctttacacagagcggacttgaaacactcgttttgtggaatttgcaagtggagattccagccgcgttgaggtcaatggtagaaaaggaaatatcttcgtataaaaactagacagaatgattctcagaaactcctttgtgatgtgtgggttcaactcacagagtttaacctttcttttcatagagcagttaggaaacactctgtttgtaaagtctgcatgtggatatttggacttctttgaggccttcgttggaaacgggtttttttcatgtaaggctagacagaagaattctcagtaacttccttgtgttgtgtgtattcaactgacagagttcaactttcatttagagagagcagatttgaaacactgtttttgtggaatttgcaagtggagatttcaagcgctttggggccaaaggcagaaaaggaaatatcttcgtataaaaactagacagaatcattctcagaaactgctctgcgatgtgtgcgttcaactctcagagtttaacttttcttttcattcagcagtttggaaacactctgtttgtaaagtctgcacgtggataacttgaccacttagaggccttcgttggaaacgggtttttttcctgtaaggctagacagaagaattcccagtaacttccttgtgttgtgtacattgaactcacagagttgaacgttcccttagacagagcagatttgaaacactctttttgtgcaattggcaagtggagatttcaagcgctttaaggtcaatggcagaaaacgaaatatcttcgtttcaaaactagacagaatcattcccacaaactgcgttgtgatgtgttcgttccactcacagagtttaacctttctgttcatagagcagttaggaaacactctgtttgtaaagtctgtaagtggatattctgacatcttgtggccttcgttggaaacgggatttcttcatattctgctagacagaagaattctcagtaacttccttgtgttgtgtttattcaactcacagagttgaacgatcctttacacagagcagacttgaaacactctttttgtggaatttgcaagtggagatttcagccgctttgaggtcaatggtagaaaaggaaatatcttcgtagaaaaactagacagaatgattctcagaaactcctttgtgatgtgtgcgttcaactcacagagtttaacctttcttttcatagagaagttaggaaacactctgtttgtaaagtctgcaagtggatattcagacctctttgaggccttcgttggaaacgggatttcttcatattctgctagagagaagaattctcagtaacttccttgtgttgtgtgtattcaactgacagagttgaactttcatttagagagagcagatttgaaacactgtttttgtggaatttgcaagtggaaatttcaagcgctttggggtcaaaggcagaaaaggaaatatcttcgtataaaaactagacagaatcattctcagaaactggtgcgtgatgtgtgcgttcaactctcagagtttaacttttcttttcattcagcggtttggaaacactctgtttgtaaagtctgcacgtggaaattttgaccacttagaggccttcgttggaaacgggtttttttcatgtaaggctagacagaagaattctcagtaacttccttgtgttgtgtgtattcaactcacagagttgaacgatcctttacacagagcagacttggaacactctttttgtggaatttgcaagtggagatttcagccgctttgaagtcaaatgtagaaaaggaaatatcttcctataaaaactagacagaatcattcccacaaactgcgttgtgatgtgtgcgttcaactcaaagagtttaacctttcttttcatagagcagttaggaaacactctgtttgtaaattctgcaagtggatattcagacctccttgaggccttcgttggaaacgggatttcttcatattctgctagacagagaattctcagtaacttccttgtgttgtgtgtattcaactcacagagttgaacgatcctttacacagagcagacttgaaacactctttttgtggaatttgcaagtggagatttcagccgctttgaggtcaatggtagaaaaggaaatatcttcgtataaagactagacagaatgattctcagaaactcctttgtgatgtttgcgttcaactcacagagtttaacttttcttttcatagagcagttaggaaacactctgtttgtaaagtctgcaagtggatattcagacctctttgaggccttcgttggaaacgggatttcttcatattatgctagacagaagaattctcagtcacttccttgtgttgtgtgtattcaactgacagagttgaactttcatttagagagagcagatttgaaacactgtttttgtggaatttgcaagtggagatttcaagcgctttggggccaaaggcagaaaaggatatatcttcgtataaaaactagacagaatgattctcagaaactcctttgtgatgtgtgcgttcaactcacagagtttaacctttcttttcatagagcagttaggaaacactctgtaaagtctgcaagtggatattcagacctccttgaggccttctttggaaaccggatttcttcatattctgctatacagaagaattctcagaaacttccttgtgttgtgtgttttcaactcacagagttcaacgatcctttacacagagcagacttgaaacactctttttgtggaatttgcaagtggagaattcagccgctttgaggtcaatggtagaataggaaatatcttcctatagaaactagacagaatgattctcagaaactcctttgtgatgtgtgcgttcaactcacagagtttaacctttcttttcatagagcagttaggaaacactctgtttgttaagtctgcaagtggatattcagacctccttgaggccttcgttggaaacgggatttcttcatattatgctagacagaagaattctcagtaagttccttgtgttgtgtgtattcaactcacagagttgaatgatcctttacacagagcagacttgaaacactctttttgtggaatttgcaagtggagatttcatccgatttgaggtcaatggtagaataggaaatatcttcctatagaaactagacagaatgattctcagaaactcctttgtgatgtgtgtgttcaactcacagagtttaacctttcttttcatagaggagttaggaaacactctgtttgtaaagtctgcaagtggatattcagacctctttgaggccttcgttggaaacgggtttttttcatgtaaggctagacagaagaattcccagtaacttccttgtgttgtgtgtattcaactcacagagttgaactttcatttacacagagcagatttgaaacactctttttgtggaatttgcaaatggagatttcaagccctttcaggccaaaggtagaaaaggaaatatcttcgtataaaaactagacagaatcattctcagaaactgctgcgtgatgtgtgcgttcaactctcagactttaacttttcttttcattcagccgtttggaaacactctgtttgtaaagtctgcacgtggatattttgaccacttagaggccttcgttggaaacgggtttttttcatgtaaggctagacagaagaattcccagtaacttccttgtgttgtgtgcattcaactcacagagttgaacgttcccttagacagagcagatttgaaacactctatttgtgcaatttgcaagtgtagatttcaagcgctttaaggtcaatggcagaaaaggaaatatcttcgtttcaaaactagacagaaatcattcccacaaactgcgttgtgatgtgttcgttcaactcacagagtttaacctttctgttcatagagcagttaggaaacactctgtttgtaaagtctgtaagtggatattctgacatcttgtggccttcgttggaaacgggatttcttcatattctgctagacagaagaattctcagtaacttccttgtgttgtgtttattcaactcacagagttgaatgatcctttacacagagcagacttgaaacactctttttgtggaatttgcaagtggagatttcagccgctttgaggtcaatggtagaaaagtaaatatcttcctataaagactagacagaatgattctcagaaactcctttgtgatgtgtgcgttgaactcacagagtttaacctttcttttcatagagcagttaggaaacactctgtttgtaaagtctgcaagtggatattcagacatctttgaggctttcgttggaaacgggagttcatcatattctgctagacagaagaattctcagtaactgccttgtgttgtgtgtattcaactcacagagttgaacgatcctttacacagagcagacttgaaacactctttttgtggaatatgcaagtggagatttcagccgctttgaggtcaatggtagaataggaaatatcttcctatagaaactagacagaatcattctcagaaactgctgcgtgatgtgtgcgttcaactctcagagtttaacttttcttttcattcagcggtttggaaacactctgtttgtaaagtctgcacgtggaaattttgaccacttagaggccttcgttggaaacgggattttttcatgtaaggctatacagaagaattcccagtaacttccttgtgttgtgtgcattcaactcacagagttgaacgttcccttagacagagcagatttgaaacactatatttgtgtaatttgcaagtgtagatttcaagcgctttaaggtcaacggcagaaaaggaaatatcttcgtttcaaaactagacagaatcattcccacaaactgcgttgtgatgtgttcgttcaactcacagagtttaacctttcttttcatagagcagttaggaaacagtctgtttgtcaattctgtaactggatattctgacatcttgtggccttcgttggaaacgggatttcttcatattctgctagacagaagaattctcagaaacttccttgtgttgtgtgtattcaactcacagagttgaacgatcctttactctgagcaggcttgaaacactccttttgtggaacttgcaattggagatttcagccgctttgaggtcaatggtagaataggaaatatcttcctatagaaactagatagaatgattctcagaaactcctttgtgatgtgtgtgttcaactcacagagtttaacctttcttttcatagagcagttaggaaacactctgtttgtaaagtctgcaagtggatattcagacccctttgaggccttcgttggaaacgggatttcttcatattctgctagacagaagaattctcagtaacttccttgtgttgtgtgtattcaactgacagagttgaactttcatttagagagagcagatttgtaacactgtttttgtggaatttgcaagtggagatttcaagcgctttggggccaaaggcagaaaaggaaatatcttcgtataaaaactagacagaatcattctcagaaactgctgcgtgatgtgtgcgttcaactctcagagtttaacttttcttttcattcagcggtttcgaaacactctgtttgtaaagtctgcacgtggatattttgaccacttagaggccttcgttggaaacgagtttttttcatgtaaggctagacagaagaattcccagtaacttccttgtgttgtgtgcattcaactcacaggagttgaacgttcccttagacagagcagatttgaaacactctatttgtgcaatttgcaagtgtagatttcaagcgctttaaggtcaatggcagaaaaggaaataccttcgtttcaaaactagacagaatcattcccacaaactgcgttgtgatgtgttcgttcaactcacagagtttaacttttcttttcatagagcagttaggaaacactctgtttgtaaagtctgcaagtggatattcagacctccttgaggccttcgttggaaacgggatttcttcatattctgctagacagaagaattctcagtaacttccttgtgttgtgtgcattcaactcacagatttgaacgatcctttacacagagcagacttaaaacacactttttgtggaatttgcaagtggagatttcagccgctttgaggtcaatagtagaaaaggaaatatcttcgtagaaaaactagacagaatgattctcagaaactcctttgtgatgtgtgtgttcaacctcacagagtttaacctttcttttcatagagcagttagtaaacactctgtttataaagtctgcaagtggatattcagacccctttgaggccttcgttggaaacgggatttcttcatattatgctagacagaagaattctcagtaacttccttgtgttgtgtgtattcaacggacagagttgaactttcatttagagagagcagatttgaaacactgtttttgtggaatttgcaagtggagatttcaagcactttggggccaaaggcagaaaaggaaatatcttcgtataaaaactagacagaatcattctcagaaactgctgcgtggtgtgtgcgttcaaatctcagagtttaacttttcttttcattcagcggtttggaaacactctgtttgtaaagtctacacgtggatattttgaccacttagaggccttcgttggaaactggttttcttcatgtaaggctagacagaagaattcccagtaacttccttgtgttgtgtacattcaactcacagagttgaacgttcccttagacagagcagatttgaaacacactttttgtgcaattggcaagtggtgatttcagccgctttgaggtcaatggtagaaaaggaaatatcttcgtataaaaactagacagaatcattcccacaaactgcgttgtgatgtgctcgttcaactcacagagtttaacctttctgttcatagagcagttaggaaacactctgtttgtaaagtctgaaagtggataatctgacatcttgtggccttcgttggaaacgggatttcttcatattctgctagacagaagaattctcagtaacttccttgtgttgtgtgtattcaactcacagagttgaaggatcctttacagagagcaggcttgaaacactctttttgtcgaatttgaaagtggagatttcagccgctttgaggtcaatggtagaataggaaatatcttctaatagaaactagacagaatgattctcagaaactcctttgtgatgtgtgcgttcaactcacagagtttaacctttcttttcatggagcagttaggaaacactctgtttgtaaagtctgcaagtggatattcagacctcctagaggccttctttggaaacaggctttcttcatattatgctagacagaagaattcccagtaacttccttgtgttgtgtgtgttcaactcacagagttgaactttcttttacacagagcagatttgaaacactctttttgtggaatttgcaaatggagatttcaagcgctttgaggccaaaggcagaaaaggaaatatcttcgtataaaaactagacagaatcattctcagaaactgctctgcgatgtgtgcgttcaactctcagagtttaacttttcttttcattcagcagtttggaaacactctgtttgtaaagtctgcacgtggatactttgaccacttagagaccttcgttggaaacgggtttttttcctgtaaggctagacagaagaattcccagtaacttccttgtgttgtgtacattcaactcacagagttgaacgttcccttagacagagcagatttgaaacactctttttgtgcaattggcaaatggagatttcaagcgctttaagttcaatggcagaaaaggaaatatcttcgtttcaaaactagacagaatcatttccacatactgcgatgtgatgtgttcgttcaactcacagaatttaacctttctgttcctagagcagttaggaaacactctgtttgtaaagactgtaagtggatattatgacatcatgtggccttcgttggaaacgggatttcttcatattctgctggacagaagaattctcagtaacttccttgtgttgtgtgtatttaactcacagagttgaatgatcctttacacagagcagacttgaaacactctttttgtggaaattgcaagtggagatttcagccgctttgaggtcaatggtagaaaagtaaatatcttcgtataaagactagacagaatgattctcagaaactcctttgtgatgtgtgcgttcaactcacagagtttaacctttcttttcatagagcagttaggaaacactctgtttgtaaagtctgcaagtggatattcagacctctttgaggccttcgttggaaacgggtttttttcatataaggctacacagaagaattctcagtaacttccttgtgttgtgtgtattcaactgacagagttgaactatcatttagagagagcagatttgaaacactgtttttgtggaatttgcaagtggagatttcaagcgctttggggccaaaggcagaaaaggaaatatcttcgtataaaaactacacagaatcattctcagaaactgctgcgtgatgtgtgcgttcaactctcagagtttaacttttcttttcattcagcggtttggaaacactctgtttgtaaagtctgcacgtggatattttgaccacttagaggccttcgttggaaacggctttttttcatgtaaggctagacagaagaattcccagtaacttccttgtgttgtgtgcattcaactcacagagttgaacgttcccttagacagagcagatttgaaacactctatttgtgcaatttgcaagtgtagttttcaagctctttaaggtcaacggcagaaaaggaaatatcttcgtttcaaaactagacagaatgattctcagaaactcctttgtgatgtgtgcgttcaactcacagagtttaacctttcttttcatagagcagttaggaaacactctgtttgtaaagtctgcatgtggatattcagacctctttgaggccttcgttggaaacggggtttcttcatattatgctagacagaagaattctcagtaacttccttgtgttgtgtgtattcaactcacagagttgaacgatcctttacacagagcagactggaaacactctttttgtggaaattgcaagtggagatttcagccgctttgaggtcaatggtagaaaaggaaatatcttcgtataaaaactagacagaatgattctcagaaactcctttgtgatgtgtgcgttcaaatcacagagtttaacttttcttttcatatagcagttaggaaacactctgtttgtaaagtctgcaagtggatattcagacctctttgaggccttcgttggaaacgggatttcttcatattatgctagacagaagaattgtcagtaacttccttgtgttgtgtgtattcaactgacagagttgaactttcatttcgagagagcagatttgaaacactgtttttgtggaatttgcaagtggagatttcaagcgctttggggccaaaggcagaaaaggaaatatcttcgtataaaaactagacagaatcattctcagaaactgctgtgtgatgtgtgcgttcaactctcagagtttaacttttcttttcattcagcggtttggaaacactctgtttgtaaagtctgcacgtggatattttgaccacttagaggccttcgttggaaacgggtttttttcatgtaaggctagacagaagaattcccagtaacttccttgtgttgtgtgcattcaactcacagagttgaacgttcccttagacagagcagatttgaaacactctatttgtgcaatttgcaagtgtagatttcaagcgctttaaggtcaatggcagaaaaggaaatatcttcgttttaaaactagacagaatcattcccacaaactgcgttgtgatgtgttcgttcaactcacagagtttaacctttcttttcatagagcagttaggaaacagtctgtttgtaaattctgtaagtggatattctgacatcttgtgaccttcgttggaaacgggatttcttcatattctgctagacagaagagttctcagtaacttccttctgttgtgtgtattcaactcacagagttgaacgatcctttacacagagcagacttgaaacactctttttgtggaatttgcaagtggagatttcagccgcttttaggtcaatagtagaaaaggaaatatcttcgtagaaaaactagacagaatgattctcagaaactcctttgtgatgtgtgcgttcaactcacagagttcaacctttcttttcatagagcagttgggaaacactctgtttgtaaagtctgcaagtggatattcagacttctttgaggccttctttggaagcgggatttcttcatattctgctagacagaagaattctcagtaacttccttgtgttgtgtgtattcaactcacagagttgaactttcatttagagagagcagatttgaagcactgtttttgtggaatttgcaagtggagacttcaagcgctttggggccaaaggcagaaaaggaaataccttcgtataaaaactagacagaatcattctcagaaactgctgcgtgatgtgtgcgttcaactctcagagtttaagttttcttttcattcagcggtttggaaacactctgtttgtaaagtctgcacgtggatattttgaccacttagaggccttcgttggaaacgggttttttcatgtaaggctagacagaagaattcccagtaacttccttgtgttgtgtgcattcaactcacagagtggaacgttcccttagacagagcagatttgaaacactctatttgtgcaatttgcaagtgtagatttcaagcgctttaaggtcaacggcagaaaaggaaatatcttcttttcaaaactagacagaatcattcccacaaactgcgttgtgacgtgttcgttcaactcacagagtttaacctttctgttcatagaggagttaggaaacactctgtttgtaaagtctgtaagtggatattctgacatcttgtggccttcgttggaaacgggatttctttatattctgctagacagaagaattctcagtaacttccttgtgttgtgtgtattcaactcacagagttgaacgatcctttacacagagcagacttgtaacactctttttgtggaatttgcatgtggagatttcagccactttgaagtcaaaggtagaaaaggaaataacttcctataaaaactagacagaatgattctcagaaactcctttgtgatgtgtgcattcaactcacagagtttaacttttcttttcatagagcagttgggaaacactctgtttgtaaagtctgcaactggatattcagacctctttgaggccttcgttggaaacgggatttcttcatattctgctagacagaagaattcccagtaacttcattgtgttgtgtgtgttcaactcacagagttgaacttccatttacacagagcagatttgaaacactctttttgtggaatttgcaagtggagatttcaagcgatttgaggccaaaggcagaaaaggaaatatacttcgtttcaaaactagacagaatcattctcagaaactgctctgcgatgtgtgcacgttcaactctcagagtttaacttttcttttcattcagcagtttggaaacactctgtttgtaaagtctgcacgtggatattttgaccacttagaggccttcgttggaaatgggttttttttcctgtaaggctagacagaagaattcccagtaacttccttgtgttgtgtgcattcaactcacagcagttgaacgttcccttagacagagcagatttgaaacactctatttgtgcaatttgcaagtgtagatttcaagcgctttaaggtcaacggcagaaaaggaaatatcttcgtttcaaaactagacagaatcattcccacaaactgcgttgtgatgtgtgcgttcaactcaaagagtttaacctttcttttcatagagcagttaggaaacactctgtttgtaaagtctgcaagtggatattcagacctccttgaggccttcgttggaaacgggatttcttcatattctgctagacaggaataattctcagtaacttccttgtgttgtgtgtattcaactcacagagttgaaagatcctttacagagagcaggcttgaaacactctttttgtcgaatttgcaagtggagatttcagccgctttgaggtcaatggtagaataggaaatatcttcttatagaaactagacagaatgattctcagaaaatcctttgtgatgtgtgcgttcaactcacagagtttaacctttcttttcatagagcagttaggaaacactctgtttgtaaagtctgcaagtagatattcagacattctttgaggccttcgttggaaacgggatttcttcatgttctgctagaaagaagaattctcagtaacttccttgtgttgtgtgtattcaactcacagagttgaacgatcctttacacagagcagacttgaaacactctttttgtggaatttgcaagtggagatttcaaccgctttgaggtcaatggtagaaaagtaaatatcttcgtataaaaactagacagagaatcattctcagtaaactgctgcgtgatgtgtgcgttcaactctcagagtttaacttttcttttcattcagcggtttggaaacactctgtttgtaaagtctgcacgtggatattttgaccacttagaggccttcgttggaaacgggtttttttcatgtaaggctagacagaagaattcccagtaacttccttgtgttgtgtgctttcaactcacagagttgaacgttcccttagacagagcagatttgaaacactctatttgtgcaatttgcaagtgtagatttcaagcgctttaaggtcaatggcagaaaaggaaatatcttcgtttcaaaactagaaagaatcattcccacaaactgcgttgtgatgtgttcgttcaactcacagagtttaacctttctgttcatagagcagttaggaaacactctgtaaagtctgtaagtggatattctgacatcttgtggccttcgttggaaacgggatttcttcatattctgctagacagaataattctcaataacttccttgtgttgtgtgtattcaactcacagagttgaaggatcctttacagagagcaggcttgaaacactctttttgtcgaatttgcaagtggagatttcagccgctttgaggtcaatggtagaataggaaatgtcttcttatagaaactagacaaaatgattctcagaaactcctttgtgatgtgggcgttcaactcacagagtttaacctttcttttcatagagcagttaggaaacactctgtttgtaagtctgcacgtggatatttggacttctttgaggccttcgttggaaacgggtttttttcatgtaaggctagacagaagaattcccagtaacttccttgtgttgtgtgtgttctactcacagagttgaactttgatttacacagagcagatttgaaacactctttttgtggaatttgcaagtggagatttcaagcgctttgaggccaaaggcagaaaaagaaatatcttcgtataaaaactagacagaatcattctcagaaactgctctgcgatgtgtgcgttcaactctcagagtttaacttttcttttcattcagcagtttggaaaaactctgtttgtaaagtctgcacgtggatattttgaccacttagaggccttcgttggaaacgggtttctttcctgtaaggctacacagaagaattcccagtaacttcttgtgttgtgtgcattcaactcacagagttgaacgttcccttagacagagcagatttgaaacactctatttgtgcaatttgcaagtgtagatttcaagcgctttaaggtcaacggcagaaaaggaaatatcttcgtttcaaaactagacagaatcattcccacaaactgcgttgtgatgggttcgttcaactcacagagtttaacctttctgttcatagagcagttaggaaacactctgtttgtaaagtctgtaagtggatattctgacatcttgtggccttcgttggaaacgggatttcttcatattctgctagacagaacaattctcagtaacttccttgtgttgtgtgtattcaactcacagagttgaacgatcctttacacagagcagacttgaaacactctttttgtggaatttgcaagtggagatttcagccgctttgagttcaatggtagaataggaaatatcttcctatagaaactagacagaatgattctcagaaactcctttgtgatgtgtgccttcaactcacagagtttaacctttcttttcatagagcagttaggaaacactctgtttgtaaagtctgcaagtggatattcagacctctttgagaccttcgttggaaacgggatttcttcatattctgctagacagaatcattctcagaaactgctctgcgatgtgtgcgttcaactctcagagtttaacttttcttttcattcagcagtttggaaacactctgtttgtaaagtctgcacgtggatattttgaccacttagaggccttcgttggaaacgggtttttttcctttaaggctagagagaaaaattcccagtaacttccttgtgttgtgtgtattcaactcacagagttgaacgttccctttgacagagcagatttgaaacactctttttctgcaatttggaagtgtagatttgaagcgctttaaggtcaatggcagaaaaggaaatatcttcgtttcaaaactagacagaacgattctcagaaactcctttgtgatgtgtgcgttcaactcacagagtttaacctttcttttcatagagcagttaggaaacactctgtttgtaaagtctgtaagtggatattcagacctgctttgaggccttcgttggaaacgggatttcttcatattatgctagacagaagaattctcagcaacttccttgtgttgtgtgtattcaactcaaggagttgaacgatcctttacacagagcagacttgaaacactctttttgtggaatttgtaagtggagatttcagccgctttgaggttaatggtagaaaatgaaatatattcgtatagaaactagacagaatgattctcagaaactcctttgtgatgtgtgcgttcaactcacagagtttaacctttcttttcatagagcagttaggaaacactctgtttgtaatgtctgcaagtggatattcagacatctttgaggctttcgttggaaacgggatttcttcatattctgctatacagaagaattcccagtaacttccttgtgttgtgtgtgttcaactcaccgagttgaactttcatttacacagagcagatttgaaacactctttttgtggtatttgcaagtggagatttcaagcgctttgaggccaaaggcagaaaaggaaatatcttcgtttcaaaactagacagaatcattctcagaaactgctctgcgatgtgtgcgttcaactctcagagtttaacttttcttttcattcagcagtttggaaacactctgtttgtaaagtctgcacgtggatattttgaccacttagaggccttcgttggaaaagggcttttccctgtaaggctagacagaagaattcccagtaacttccttgtgttgtgtgcattcaactcacagagttgaacgttcccttagacagagcaggtttgaaacactctatttgtgcaatttgcaagtgtagatttcaagcgcattaaggtcaatggcagaaaaggaaatatcttcgtttcaaaactagacagaatcattcccacaaacagcgttgtgatgtgttcgttcaactcacagagtttaacctttcttttcatagagcagttaggaaacagtctgtttgtcaattctgtaagtggatattctgacatcttgtggccttcgttggaaacgggatttcttcatattctgctagacagaagaaatctcagtaacttccttgtgttgtgtgtattcaactcacacagttgaacgatccttttcagagagcagacttgaaacactctttttgtggaatttgcaagtggagatttcagccgctttgaggtcaatggtagaaaaggaaatatcttcgtataaagactagacagaatgattctcagaaactcctttgtgatgtgtgtgttcaactcacagagtttaacctttcttttcatacagcagttaggaaacactctgtttgtaaattctgcaagtggatattttgaccgctttgaggccttcgttggaaacaagtttttttcatgtaaggctagacagaagaattctcagtaactgccttgtgttgtgtgtattcaactcacagagttgaacgatcctttacacagagcagacttgaaacactctttttgtggaatttgcaagtggagatttcagccgctttgaggtcaatggtagaataggaaatatcttcctatagaaactagagagaatcattctcagaaactgctctgcgatgtgtgcgttcaactctcagagttttacttttcttttcattcagcagtttggaaacactctgtttgtaaagtctgcacgtggatattttgaccatttagaggccttcgttggaaacgggtttttttcctgtaaggctagacagaagaattctcagtaacttccttgtgttgtgtgtattcaactcacacagttgaacgatcctttacacagagcagacttgtaacactctttttgtggaatttgcaagtggagatttcagccgctttgaagtcaaatgtagaaaaggaaatatcttcctataaaaactagacatagtgattctcagaaactcctttgtgatgtctgcgttcaactcacagagtttaacctttcttttcatagagcagttaggaaacactctgtttgtaaagtctgcaagtggatatagagacctcctttaggccttcgttggaaatgggatttcttcatattctgctatacagaagaattctcagaaacttcccttgtgttgtgtgtattcaactcacagagttgaacgatcgtttacacagagcagacttgagacactctttttgtggaatttgtaagtggagatttcagccgctttgaggtcaatggtagaaaaggaaatatcttcatataaaaactagacagaatgattctcagaaacttctttgtgatgtgtgcgttcaactcacagagtttaacctttcttttcatagagcagttaggaaacactctgtttgtaaactctgcaagtcgatattcagacctctttgaggccttcgttggaaacgggatttcttcatactatgctagacagaagaattcccagtaacttccttttgttgtgtgtgttcaactcacagagttgaactttcatttacacagagcagatttgaaacactctttttgtgaaatttgcaagtggagatttcaagcgctttgaggccaaaggcagaaaaggaaatatcttcgtttcaaaactagacagaatcattctcagaaactgctgcgtgatgtgtgcgttcaactctcagagtttaacttttcttttcattcagcggtttggaaacactctgtttgtaaagtctgcacgtggaaattttgaccacttagaggccttcattggaaacgggtttttttcatgtaaggctagacagaagaattcccagtaacttccttgtgttgtgtgcattcaactcacagagttgaacgttcccttagacagagcagatttgaaacaatctatttgtgcaatttgcaagtgtagatttcaagcgctttaaggtcaatggcagaaaaggaaatatcttcgtttcaaaactagacagaatgattcccacaaactgcgttgtgatgtgttcgttcaactcacagagtttaacctttctgttcatagagcagttaggaaacactctgtttgtaaagtctgtaagtggatattctgacatcttgtggccttcgttggaaacgggatttcttcatattatgctagacagaagaattctcagtaacttccgcgtgttgtgtgtattcaactcacagagttgaacgatcctttacacagagcagacttgaaacactctttttgtggaatttgccagtggagatttcagccgctttgaggtcaatggtagaaaaggaaatatcttcctgtaaaaactagacagaatgattctcagaaactccttcgtgatgtgtgcgttgaactcacagagtttaacctttcttttcatagagcagttaggaaacactctgtttgtaaagtctgcaagtggatattcagacctctttgaggcgttcgttggaaacgggtttttttcatataaggctagagagaagaattctcagtaacttccatgtgttgtgagtattcaactcacagagttgaacgatcctttacacagagcagacttgtaacaatcattttgtggaatttgcaattggagatttcagccgctttgaagtcaaaggtagaaaaggaaatatcttcgtataaaaactagacagaatcattctcagaaactgctgcgtgatgtgtgcgttcaacttctcagagtttaactttgcttttcattcagcggtttggaaacactctgtttgtaaagtctgcacgtggatattttgaccacttagtggccttcgttggaaacgggtttttttcatgtaaggctagacagaagaattcccagtaacttccttgtgttgtgtgcattcaactcacagagatgaacgttcccttagacagagcagatttgaaacactctatttgtgcaatttgcaagtgtagatttcaagcgctttaaggtcaatggcagaaaaggaaatatcttcgtttcaaaagtagacagaatcattcccacaaactgcgttgtgatgtgttcgttcaactcacagagtttaacctttcttttcatagagcagttaggaaacactctgttggtaaattctgtaagtggatattctgacatcttgtggccttcgttggaaacaggatttcttcatattctgctacacagaagaattctcagaatcttccttgtgttgtgtgtattcaactcacagagttgaacgatcctttacacagagcagacttgaaacactctttttgtggaatttgcaagtggagatttcagccgctttgaggtcaaaggtagaaaatgaagtatcttcgtataaaaactagacagaatgattctcagaaactcctttgtgatgtgtgtgttcaactcacagagtttaacctttcttttcatagagcagttaggaaacactctgtttgtaaagtctgcaagtggatattcagacctctttgaggccttcgttggaaacgggttttttcatataaggctagacaaaaagaattctcagtaacttccttgtgttgtgtgtattcaactgacagagttgaactttcatttagacagagcagatttgaaacactctttttctggaatttgcaagtggagatttcaagcgctttgaggccaaaggcagaaaaggaaatatcttcgtataaaaactacacagaatcattctcagaaactgctctgcgatgtgtgcgttctactctcagagtttaacttttcttttcattcagcagtttggaaacactctgtttgtaaagtctgcacgtggataacttgaccacttagaggccttcattggaaacgggtttttttcatgtaaggctagacagaagaattctcagtaacttccttgtgttgtgtgtattcaactcacagagttgaacgatcctttacacagggcagacttgaaacactctttttgtggaatttgcaagtggagatttcagcctctttgaggttaatggtagaaaatgaaatatcttcctatagaaactagacagattgattctcagaaactcctttgtgatgtgtgcgttcaagtcacagagtttaacctttcttttcatacagcagttaggaaacactctgtttgtaaagtctgcaagtggatattcagacctctttgtggccttcgttggaaacgggatttcttcatattctgctagacagaagaattctcagtaacttccttgtgttgtgtgtattcaactcacagagttgaacgatcctttacacagagcagacttgaaacactctttttgtggaatttgcaagtggagatttcagccgctttgaggtcaatggtagaaaagggaatatcttcgtatagaaactagacagaatgattctcagaaactcctttgtgatgtgtgtgttcaactcacaggagtttaacctttcttttcatagagcagttaggaaacactctgtttgtaaagtctgcaagtggatattcagacctcgttgaggccttcgttggaaacgggatttcttcatattctgctagacagaagaattctcagtaacttccttgtgttgtgtgtattcaaactgacagagttgaactttcatttagagagagcagatttgaaacactgtttttgtggaatttgcaagtggagatttcaagcgctttggggccaaaggcagaaaaggaaatatcttcgtataaaaactagacagaatcattctctgaaactgctctgtgatgtgtgcgttcaactctcagagtttaacttttcttttcattcagcagtttggaaacactctgtttgtaaagtctgcacgtggatattttgaacacttagaggccttcgttggaaacgggtttttttcatgtaaggctagacagaagaattcccagtaacttccttgtgttgtgtgcattcaactcacagagttgaacgttcccttagacagagcagatttgaaacactctatttgtccaatttgcaagtgtagatttcaagcgctttaaggtcaacggcagaaaaggaaatatcttcgtttcaaaactagacagaatcattcccacaaactgcgttgtgatgtgttcgttcaacacacagagtttaacctttcttttcatagagcagttaggaaacagtctgtttgtaaattctgtaagtggatattctgacatcttgtggccttcgttggaaacgggatttcttcatattctgctagacagaagaattctcagtaacttccttgtgttgtgtgtattcaactcacagagttgaacgatcctttacacagagcggacttgaaacactctttttgtggaatttgcaagtggagatttcagccgcgttgaggtcaatggtagaaaaggaaatatcttcgtatagaaactagacagaatgattctcagaaactcttttgtgatgtgtgcgttcaactcacagagttcaacctttcttttcatagagcagttgggaaacactctgtttgtaaagtctgcaagtggatattcagacttctttgaggccttcgttggaagcgggatttcttcatattctgcttgacagaagaattcccagtaacttccttgtgttgtgtgtgttcaactcacagagttgaactttcatttacacagagcagatttgaaacactctttttgtggaatttgcaagtggagatttcaagcagtttgaggccaaaggtagaaaaggaaatatcttcgtttcaaaactagacagaatcattctcagaaactgctctgcgatgtgtgcgttcaactctcagagtttaacttttcttttcattcagcagtttggaaacactttgtttgtaaagtctgcacgtggatattttgaccacttagaggccttcgttggaaacgggtttttttcctgtaaggctagacagaagaattcccagtaacttccttgtgttgtgtacattcaactcacatagttgaacgttcccttagacagagcagatttgaaacactctttttgtgcaattggcaaatggagatttcaagcgctttaaggtcaatggcagaaaaggaaatatcttcgtttcaaaactagacagaatcattcccacaaactgcgttgtgatgtgttcattcaactcacagagtttaacctttctgttcatagagcagttaggaaacactctgtttgtaaagtctgtaagtggatattctgacatcttgtggccttcgttggaaacgggatttcttcatattctgctagacagaagaattctcagaaacttccttgtgttgtgtgttttcaactcacagagttgaacgatcctttacacagagcagacttgcaacactccttttgtggaatttgcaagtggagatttcatccgctttgaggtcaatggtagaataggaaatatcttcctatagaaagtagacagaatgattctcagaaactcctttgtgatgtgtacgttcaactcacagagtttaacttttcttttcatagagcagttaggaaacactctgtttgtaaagtctgcaagtggatattcagacctctttgaggccttcgttggaaacgggtttttttcatataaggctagacagaagaattcccagtaactttccttgtgttgtgtgtgttcaactcacagagttgaactttcatttacacagagcagatttgaagcactctttttgtggaatttgcaagtggagatttcaagcgctttgaggccaaaggcagaaaaggaaatatcttcgtttcaaaactagacagaatcattctcagaaactgctctgtgatgtgtgcgttcaactctcagagtttaacttttcttttcattcagcagtttggaaacactctgtttgtaaagtctgcacgtggatattttgaccacttagaggccttcgttggaaacgggtttttttcatgtaaggctagacaggagaattcccagtaacttccttgtgttgtgtacattcaactcacagagttgaacgttcccttagacagagcagatttgaaacactctttttgggcaattggcaagtggagattacaagcgctttaaggtcaatggcagaaaaggaaatatcttcgtatcaaaactagacagaatcattcccacaaactgcgttgtgatgtgttcgttcaactcacagagtttaacctttctgttcatagagcagttaggaatcactctgtttgtaaactctgcaagtggatattcagacctctttgaggccttcgttggaaacgggatttcttcatattatgctagacagaagaattctcagtaacttccttgtgttgtgtgtattcaactcacagagttgaacgatcctttacacagagcagacttgtaacactctttttgtggaatttgcaagtggagatttcaagcgctttgaggccaaaggcagaaaaggaaatatcttcgtttcaaaactagacagaatgattctcagaaactcctttgtgatgtgtgcgttcaactcacagagttttacctttcttttcatagagcagttaggaaacactctgtttctaaagtctgcaagtgaatattcagacctctttgaggccttcgttggaaacgggttttttcatataaggctagacagaagaattcccagtaacttccttgtgttgtgtgtgttcaactcacagagttctacattcatttacacagagcagatttgaaacactctttttgtggaatttgcaagtggagatttcaagcgctttgaggccaaaggcagaaaaggaaatatcttcgtataaaaactagacagaatcatgctgagaaactgctctgcgatgtgtgcgttcaactctcagaagtttaacttttcttttcattcagcagtttggaaacactctgtttgtaaagtctgcacgtggataacttgaccacttagaggccttcgttggaaacgggtttttttcatgtaaggctagacagaggaattcccagtaacttccttgtgttgtgtacattcaactcacagagttgaacgttcccttagacagagcagatttgaaacactctttttgtgcaattggcaagtggagatttcaagcgctttaaagtcaatggcagaaaaggaaatatcttcgtttcaaaactagacagaatcattcccacaaactgcgttgtgatgtgttcgttcaactcacagagtttaacatttcttttcatagagcagttaggaaacagtctgtttgtcaattctgtaagtggatattctgacatcttgtggccttcgatggaaacgggatttcttcatattctgctagagagaagaattctcagtaacttccttgtgttgtgtgtattcaactcacagagttgaacgatcctttacagagagcagacttgaaacactctttttgtggaattcgcaagtggagatttcagccgctttgaggtcaatgatagaataggaaatatcttcctatagaaactagacagaatgattctcagaaactcctttgtgatgtgtgcgttaaactcacagagtttaacctttctgttcatagagcagttaggaaacactctgtttgtaaagtctgcaagtggatattcagacctccttgaggccttcgttggaaacgggatttcttcctattctgctagacagaagaattctcagtaacttccttgtgttgtgtgtattcaactgacagagttgaactttcatttagagagagcagatttgaaacactgtttttgtggaatttgcaagtggagatttcaagcgctttgcggccaaaggcagaaaaggaaatatcttcgtataaaaactagacagaatcattctcagaaactgctgcgtgatgtgtgcgttcaactctcagactttaacttttcttttcattcagccgtttggaaacactctgtttgtaaagtctgcacgtggatattttgaccacttagaggccttcgttggaaacgggtttttttcctgtaaggctagacagaagaattcccagtaacttccttgtgttgtgtgcattcaactcacagagttgaacgttcccttagacagagcagatttgaaacactctatttgtgcaatttgtagtgtagatttcaagcgctttaaggtcaatggcagaaaaggaaatttcttcgtttcaaaactagacagaatcattcccacaaactgcgttgtgatgttttcgttcaactcacagagtttaacctttctgttcatagagcagttaggaaacactctgtttgtaaagtctgtaagtggatattctgacatcttgtggccttcgttggaaacgggatttcttcatattctgctagacagaagaattctcagtaacttccttgtgttgtgtgtattcaaatcacagagtggaatgatcctttacacagagcagacttgaaacactctttttgtggaatttgcaagtggagatttcagccgctttgaggtcaatggtagaaaaggaaatatctacgtataaagattagacagaatgattctcagaaactcctttgtgatgtgtgcgttcaactcacagagtttaacctttcttttcatagagcagttaggaaacactctgtttataaagtctgcaagtggatattcagacctctttgaggccttcgttggaaacgggatttcttcatattctgctagacagaagaattctcagtaacttccttgtgttgtgtgtattcaactgacagagttgaactttcatttagagagagcagatttgaaacactgtttttgtggaatttgcaagtggagatttcaagcgctttggggccaaaggcagaaaacgaaatatcttcgtatataaactagacagaatcattctcagaaactgctgcgtgatgtgtgcgttcaactctcagagtttaacttttcttttcattcagcggtttggagacactctgtttgtaaagtctgcacgtggatattttgaccacttagaggccttcgttggaaacgggtttttttcatgtaaggctagacagaagaattcccagtaacttccttctgttgcttacattcagctcacagagttgaacgttcccttagacagagcagatttgaaacactctttttgtgcaattggcaagtggagatttcaagcgctttaaggtcagtggcagaaaaggaaatatcttcgtttcaaaactagacagaatcattcccaaaaactgcgttgtgatgtgttcgttcaactcacagagtttaacctttctgttcatagagcagttaggaaacactctgtttgtaaagtctgtaagtggatattctgacatcttgtggccttcgttggaaacgggatttcttcatattctgctagacagaagaattctcagtaacttccttgtgttgtgtgtattcaactcacagagttgaacgattctttacacagagcagacttgaaacactctttttgtgaaatttgcaagtggagatttcagccgctttgagttcaatggtagaataggaaatatcttcctatagaaactagacagaatgattctcagaaactcctttgtgatgtgtgcgttcaactcacagagttcaacctttcttttcatagagcagttgggaaacactctgttcgtaaagtctgcaagtggatattcagacttctttgaggccttcgttggaagcgggatttcttcaaattctgctagacagaagaattcccagtaacttccttctgttgtgtgtgttcaactcacagagttgaactttcatttacacagagcagatttgaaacactctttttgtggaatttgcaagtggagatttcaagcgctttgaggccaaaggcagaaaaggaaatatcttcgtataaaaactagacagaatcattctcagaaaccgctctgtgatgtgtgcgttcaactctcagagtttaacttttcttttcatttagcagtttggaaacactctgtttgtaaagtctgcacgtggatattttgaacacttagaggccttcgttggaaacgggtttttttcatgtaaggctagacagaagaattcccagtaacttccttgtgttgtgtgcattcaactcacagagttgaaccgttcccttagacagagcagatttgaaacactctatttgtgcaatttgcaagtgtagatttcaagcgctttaaggtcaacggcagaaaaggaaatatcttcgtttcaaaactagacagaatcattcccacaaactgcgttgtgatgtgttcgttcaactcacagagtttaacctttctgttcatagagcagttaggaaacactctgtttgtaaagtctgtgagtggatattctgacatcttgtggccttcgttggaaacgggatttcttcatattctgctagacagaagaattctcagtaacttccttgtgttgtgtgtattcaactcacagagttgaacgatcctttacacagagcagacttgaatcactctttttgtggaatttgcaagtggagatttcagccgctttgagttcaatggtagaataggaaatatcttcctatagaaactacacagaatgattctcagaaactcctttgtgatgtgtgcgttcaactcacagagtttaacctttcttttcatagagcagttaggaaacactctgtttggaaagtctgcaagtggatattcagacctctttgaggccttcgttggaaacgggtttttttcatataaggctagacagaagaattctcagtaacttccttgtgttgtgtgtattcaactcacagagttgaacgatcctttacacagagcagacttgtaacactctttttgtggaatttgcaagtggagatttcaagcgctttgaggccaaaggcagaaaaggaaatatcttcgtataaaaactagacagaatcattctcagaaactgctctgcgatgtgtgcgttcaactctcagagtttaacttttcttttcattcagcagtttggaaacactctgtttgtaaagtctgcacgtggatattttgaccacttagaggccttcgttggaaacgggtttttttcatttaaggctagacagaagaattcccagtaacttccttgtgttgtgtgcattcaagtcacagagttgaacgttcccttagacagagcagatttgaaacactctatttgtgcaatctccaagtgtagatttcaagcggtttaaggtcaacggcagaaaaggaaatatcttcgtttcaaaactagacagaatcattctcagaaactcctttgtgatgtgtgcgttcaactcacagagtttaacttttcttttcatagagccgttaggaaacactctgtttgtaaagtctgcaagtggatattcagacctctttgaggccttcgttggaaacgggatttcttcatattatgctagacagaagaattctcagtaacttccttgtgttgtgtgtattcaactcacagagttgaacgatcctttacacagagcagacttgaaacattctttctgtggaatttgcaagtggagatttcagccgctttgaggtcaatggtagaataggaaatattttcctatagaaactagacagaatgattctcagaaacttctttgtgatgtgtgcgttcaactcacagagtttaacttttcttttcatagagcagttaggaaacactctgcttgtaatctctgcaagtggatattcagtcctctttgaggccttcgttggaaacgggatttcatcatactatgctagacagaagaattctcagtaacttccttgtgttgtgtgtattcaactgacagagttgaactttcatttagagagagcagatttgaaacactctttttgtggaatttgcaagtggagatttcaagcgctttggggccaaaggcagaaaaggaaatatcttcgtataaaaactagacagaatcattctcagaaactgctctgcgatgtgtgccttcagcgctcagagtttaacttttcttttcattcagcagtttggaaacactctgtttgtaaagtctgcacgtgtatattttgaccacttagaggccttcgttggaagcgggtttttgtcatgtaaggttagacagaataattcccagtaacttccttgtgttgtgtacattcaacttacagagttgaacgttcccttggacagagcagatttgaaacactctttttgtgcaattggcaagtggagatttcaagcgcttaaggtcaatggcagaaaaggaaatatcttcgtttcaaaactagacagaatgattctcagaaactcctttgtgatgtgtgcgttcaactcacagagtttaacctttcttttcatagagcagttaggaaacactctgtttgcaaagtctgcaagtggatattcagacctctttgaggccttctttggaaacgggatttcttcatattatgctatacacaagaattctcagtaacttccttgtgttgtgtgtattcaactcacagagttgaacgatctcttacacagagcagagttgaaacactctttttctggaatttgcaagtggagatttcagccgctttgaggtcaaaggtagaataggaaatatcttcctatagaaactagacagaatgattctcagaaactcctttgtgatgtgtgcgttcaacacacagagtttaacctttcttttcatagagcagttagggaacactctgtttgtaaagtctgcaagtggatattcagacctctttgaggccgtcgttggaaacgggatttcttcatattatgctagacagaagaattcccagtaacttccttgtgttgtgtgtattcaactcacagagttgaactttcatttacacagagcagatttgaaacactctttttgtggaatttgcaaatggagatttcaagcgctttgaggccaaaggcagaaaaggaaatatcttcgtataaaaactagacagaatcattctcagaaactgctctgcgatgtgtgcgttcaactctccgagtttaacttttcttttcattcagcagtttggaaacactctgtttgtaaagtctgcacgtggataatttgaccacttagaggccttcgttggaaacgggttttttttcatgtaaggctagacagaagaattcccagtaacttccttgtgttgtgtacattcaactcacagagttgaacgttcccttagacagagcagatttgaaacactctttttgtgcaattggcaagtggtgatttcagccgctttgaggtcaatggtagaaaaggaaatatcttcgtataaaaactagacagaatgattctcataaactcctttgtgatgtgtgcgttcaactcacagagtttaacctttctgttcatagagcagttaggaaacactctgtttgtaaagtctgtaagtggatattctgacatcttgtggccttcgttggaaacgggatttcttcatattctgctagacagaagaattctcagaatcttccttgtgttgtgtgtattcaactcacagagttgaacgatcctttacacagagcagacttgaaacactctttttgtggaatttgcaagtggagatttcagccgctttgaggtccatggtagaaaaggaaatatcttcgtctaaaaactagacagaatgattctcataaactcctttgtgatgtgtgcgttcaactcacagagtttaacttttcttttcatagaggagttaggaaacactctgtttgtaaagtctgcaagtggatattcagacctctttgaggccttcgttggaaacgggatttcttcatattctgctagacagaagaattctcagtaacttccttgtgttgtgtgtattcaactcacagagttgaacgatcctttacacagagcagacttgaaacactctttttgtggaatttgcaagtggagatttcagcctctttgaggtcaatagtagaaaaggaaatatcttcgtagaaaaactagacagaatcattctcaaaaactgctgcgtgatgtgtgcgttcaactctcagactttaacttttcttttcattcagccgtttggaaacactctgtttgtaaagtctgcacgtggatattttgaccacttagaggccttcgttggaaacgggtttttttcatgtaaggctagacagaagaattctcagtaacttccttgtgttgtgtgtattcaactcacagagttgaacgatcctttactcagagcaggcttgaaacactccttttgtggaacttgcaattggagatttcagccgctttgaggtcaatggtagaataggaaatatcttcctatagaaactagacagaatgattctcagaaactcctttgtgctgtgtgcgttcagctcacagagtttaacctttcttttcatagagccgttaggaaacactctgtttgtaaagtctgcaagtggatattcagacgtctttgaggccttcgttggaaacgggatttcttcatattctgctagacagaagaattctcagaaacttccttgtgttgtgtgttttcaactcacggagttgaacgatgctttacacagagtagacttgaaacactctttttgtgtaatttgcaagtggagatttcagccgctttgaggtcaatggtagaaaaggaaatatcttcgtataaaaactagacagaatgattctcagaaactcctttgtgatgtgtgtgttcaactcacagagtttaacctatcttttcatagagcagttagtaaacactctgtttataaagtctgcaagtggatattcagacccctttgaggccttcgttggaaacgggatttcttcatattatgctagacagaagaattctcagtaacttccttgtgttgtgtgtattcaactgacagagttgaactttcatttagagagagcagatttgaaacactgtttttgtggaatttgcaaatggagatttcaagcgctttggtgccaaaggcagaaaaggaaatatcttcgtataaaaactagacagaatcattctcagaaactgctctgcgatgtgtgcgttcaactctcagagtttaacttttcttttcattcagcagtttggaaacactctgtttgtaaagtctgcacgtggataatttgacctcttagaggccttcatttgaaacgggtttttttcatgtaaggctagacagaagaattcccagtaacttccttgtgttgtgtgcattcaagtcacagagttgaacgtttccttagacagagcagaattgaaacactctatttgtgcaatttgcaagtgtagatttcaaccgctttaaggtcaacggcagaaaaggaaatatcttcgtttcaaaactagacagaatcattcccacaaactgcgttgtgatgcgtttgttcaactcacagagtttaacctttcttttcatagagcagttaggaaacagtctgtttgtaaattctgtaagtggatattctgacatcttgtggcctcgctggaaacgggattacttcatattctgctagacagaagaattctcagtaacttccttgtgttgtgtgtattcaactctcagagttgaacgatcctttacacagagcagacttgaaacactctttttgtggaatttgcaagtggagatttcagccgctttgaggtcaatagtagaaaaggaaatatcttcgtagaaacactagacagaatgattctcagaaacttctttgtgatgtgtgcgttcaactcacagagtttaacctttcttttcatagggcagttaggaaacactctgtttgtaaactctgcaagtggatattcagacctctttgaggccttcgttggaaacgggatttcttcatactatgctagacagaagaattctcagtaacttccttgtgttgtgcttattcaactgacagagttgaacattcatttagagagagcagatttgaaacactgtttttgtggaatttgcaagtggagatttcaagcgctttggggccaaaggcagaaaacgaaatatcttcgtataaaaactagacagaatcattctcagaaactgctgcgtgatgtgtgcgttcaactctcagagtttaacttttcttttcattcaccggtttggaaacactctgtttgtaaagtctgcacgtggacattttgaccacttagaggtcttctttggaaacgggtttttttcatgtaaggctagacagaagaattcccagtaacttccttgtgttgtgtgcattcaactcacagagatgaacgttcccttagacagagcagatttcaaacactctatttgtgcaatttgcaagtgtagatttcaagcgctttaaggtcaatggcagaaaaggaaatatcttcgtttcaaaactagacagaatcattcccacaaactgcgttgtgaagtgctcgttcaactcacagagtttaacctttctgttcatagagcagttaggaaacactctgtttgtaaagtctgtaagtggatattctgacatcttgtggccttcgttggaaacggaatttcttcatattctgctagacagaagaattctcagtaacttccttgtgttgtgtgtattcaactcacagagttgaacgatcctttacacagagcagacttgaaacactctttttgtggaatttgcaagtggagatttcagccgctttgagttcaatggtagaataggaaatatcttcctgtagaaactagacagaatgattctcagaaactcctttgtgatgtgtgcgttcaactcacagagttcaacctttcttttcatagagcagttgggaaacactctgtttgtaaagtgtgcaagtggatattcagacttctttgaggccttcgttggaagcgggatttcttcatgttctgctagaaagaagaattctcagtaacttccttgtgttgtgtgttttcaactgacagagttgaactttcatttagagagagcagatttgtaacactgtttttgtggaatttgcaagtggagatttcaagcgctttggggccaaaggcagaaaaggaaatatcttcgtataaaaactagacaaaatcattctcagaaactgctctgcgatgtgtgcgctcaactctcagagtttaacttttcttttcattcagcagtttggaaacactctgtttgtaaagtctgcacgtggatattttgaccacttagaggccttcgttggaaacgggtttttttcctgtaaggctagacagaagaattcccaggaacttccttgtgttgtgtacattcaactcacagagttgaacgttcccttagacagagcagatttgaaacactctttttgtgcaattggcaaatggagatttcaagcgctttaagttcaatggcagaaaaggaaatatcttcgtttcaaaactagacagaatcaatcccacaaactgcgttgtgatgtgttcgttcaactcacagagtttaacctttctgttcatagagcagttaggaaacactctgtttgtaaagtctgtaagtggatattctgacattttgtggccttggttggaaatggcatttcttcatatactccaagacagaagaattctcagtaacttccttgtgttgtgtgtattcaactcacagagttgaacgatcctttacacagagcggacttgtaacactctttttgtggaatttgcaagtggagatttcagccgctttgaagtcaaaggtagaaaaggaaatatcttcctataaaaactagacagaatgattctcagaaactcctttgtgatgtgtgcgttcaacacacagagtttaacttttcttttcatagagcagttaggaaacactctgtttgtaaagtctgcaagtggatattcagacctctttgaggccttcgttggaaacggaatttcttcatattatgctagacagaagaattcccagtaacttccttgtgttgtgtgtattcaactcacagagttgaactttcatttacacagagcagatttgaaacactctttttgtggaatttgcaagtggagatttcaagcgctttgaggccaaaggcagaaaaggaaatatcttcgtataaaaactagacagaatcattctcagaaactgctctgcgatgtgtgcgttcaactctcagagtttaacttttcttttcattcagcagtttggaaacaatctgtttgtaaagtctgcacgtggataatttgaccacttagaggccttcgttggaaacgggtttttttcctgtaaggctagacagaagaattcccagtaacttccttgtgttgtgtacattcaactcacagagttgaacgttcccttagacagagcagatttgaaatactctttttgtgcaattggcaagtggagatttcaagcgctttaaggtcaatggcagaaaaggaaatatctgcgtttcaaaactagacagaatcattcccacaaactgcgttgtgatgtgttcgttcaactcacagagtttaacctttcttttcatagagcagttaggaaacactctgtttgtaaattctgtaagtggatattctgacatcttgtggccttcgtttgaaacgggatttcttcatattctgctagacagaagaattctcagtaactttccttgtgttgtgtgtattcaactcacagagttgaacgatcctttacacagagcagacttgtaacactctttttgtggaatttccaagtggagatttcagccgctttgaagtcaaaggtagaaaaggaaatatcttcctataaaaactagacagaatgattctcagaaactcctttgtgatgtgtacgttcaactcacagagtttaacctttcttttcatagagtagttaggaaacactctgtttgtaaagtctgcaagtggatattgagacctctttgaggccttcgttggaaacgggtttttttcatataaggctagacagaagaattcccagtagcttccttgtgttgtgtgtgttcaactcacagagttgaactttcatttacacagagcagatttgaaacactctttttgtggaagttgcaagtggagatttcaagcgctttgaggccaaaggcagaaaaggaaatatcttcgtttcaaaactagacagaatcattctcagaaactgctctgtgatgtgtgcgttcaactctcagagtttaacttttcttttcattcagcagtttggaaactctctgtttgtaaagtctgcacgtgcatattttgaacacttagaggccttcgttggaaacgggtttttttcatgtaaggctagacagaagaattcccagtaacttccttgtgttgtttgcattcaactcacagagttgaacgttcccttagacagagcagatttgaaacactgtatttgtgcaatttgcaagtgtagatttcaagcgctttaaggtcaatggcagaaaaggaaatatcttcgtttcaaaactagacagaatcattcccacaaactgcgttgtgatgtgttcgttcaactcacagagtttaacctttctgttcatagagcagttaggaaacactctgtttgtaaagtctgtaagtggatattctgacatctagtggccttcgttggaaacgggatttcttcatattctgctagacagaagaattctcagtaacttccgcgtgttgtgtgtattcaactcacagagttgaacgatcctttacacagagcagacttgtaacactctttttgtggaatttgcaagtggagatttcagccgctttgaagtcaaaggtagaaaaggaaatatgttcctataaaaactagacagaatgattctcagaaactcctttgtgatgtgtgcgttcaactcacagagtttaacctttcttttcatagagcagttaggaaacactctgtttgtaaagtctgcaagtggatattcagacctcttagaggccttcgttggaaacggttttttttcatataaggctagacagaagaattctcagtaactttccttgtgttgtgtgtattcaactcacagagttgaacgatcctttacacagagcagacttgtaaaactctttttgtggaatttgcaagtggagatttcagccgctttgaagtcaaaggtagaaaaggaaataacttcctataaaaactggacagaaatcattctcagaaactgctctgcgatgtgtgcgttcaactctcagcagtttaacttttcttttcattcagcagtttggaaacactctgtttgtaaagtctgcacgtggataatttgaccacttagaggtcttcgttggaaacgggtttttttcatgtaaggctagacagaagaattcccagtaacttccttgtgttgtgcgcattcaactcacagagttgaacgttcccttagacagagcagatttgaaacactctatttgtgcaatttgcaagtgtagatttcaagcgctttaaggtcaacgccagaaaaggaaatatcttcatttcaaaactagacagaatcattcccacaaactgcgttgtgatgtgttcgttcaactcacagagtttaacttttcttttcatagagcagttaggaaacactctgtttgtaaagtctgtaagtggatattctgacatcttgtggccttcgttggaaacgaggattttcttcatattctgctagacagaagaattctcattaacttccttgtgttgtgtgtattcaactcacagagttgaacgatcctttacacagagcagacttgtaacactctttttgtggaatttgcaagtggagatttcagccgctttgaaatcaaaggtagaaaaggaaatatcttcctataaaaactagacagaatgattctcagaaactcctttgtgatgcgtgcgttcaactcacagagtttaacctttcttttcatagagcagttaggaaacactctgtttgtaaagtctgcaagtggatattcagacctctttgaggccttcgttggaaacgggtttttttcatagaaggctagacagaagaattctcagtaacttccttgtgttgtgtgtattcaactgacagagttgaactttcatttagagagagctgatttgaaacactgtttttgtggaatttgcaagtggagatttcaagcgctttggggccaaaggcagaaaaggaaatatcttcgtataaaaactagacagaatcattctcagaaactgctgcgtgatgtgtgcgttcaactcttagagtttaacttttcttttcattcagcggtttggaaacactctgtttgtaaagtctgcacgtggatattttgaccacttagaggccttcgttggaaacgggttttttgcatgtaaggctagacagaagaattcccagtaacttccttgtgttgtgtgcattcaactcacagagttgaacgttcccttagacagagcagatttgaaacactctatttgtgcaatttgcaagtgtagatctcaagcgctttaaggtcaatggcagaaaaggaaatatcttcgtttcaaaactagacagaatgattctcataaactcctttgtgatgtgtgcgttcaacacacagagtttaacctttctgttcatagagcagttaggaaacactctgtttgtaaagtctgcaagtggatattcagacctccttgaggccttcggtggaaacgggatttcttcatattctgctagacagaataattctcagtaacttccttgtgttgtgtgtattcaactcacagagttgtacgatcctttacagagagcagacttgaaacactctttttgtggaatttgcaagtggagatttcagcagctttgaggtcaacggtagaataggaaatatcttcctatagaaactagacagaatgattctcagaaactcctttgtgatgtgtgcgttcaactcacagagtttaacctttcttttcatagagcagttaggaaacactctgtttgtaaagtctgcaagtggatattcagacctctttgaggccttcgttggaaacgggttttttcatataaggctagacagaagaattcccagtaacttctttgtgttgtgtgtgttcaactcacagagttgaactttcatttacacagagcagatttgaaacactctttttgtggaatttgcaaatggagatttcaagcgctttgaggccaaaggcagaaaaggaaatatcttcgtataaaaactagacagaatcattctcagaaactgctctgcaatgtgtgcgttcaactctcagagtttaacttttcttttcattcagcagtttggaaacactctgtttgtaaagtctgcacgtggataatttgaccacttagaggccttcgttggaaacgggtttttttcatgtaaggctagacagaagaattctcagtaacttccttgtgttgtgtgtattcaactcacagagttgaacgatcctttacacagagcagacttgtaacactctttttgtggaatttgcaagtggagatttcagccgctttgaagtcaaaggtagaaaaggaaatgtcttcctataaaaactagacagaatcattcccacaaactgcattgtgatgtgttcgttcaactcacagagtttaacctttcttttcatagagcagttaggaaacactctgttggtaaattctgtaagtggatattctgacatcttgtggccttcgttggaaacgggatttcttcatattctgctacacagaagaattctcagtaacttccttgtgttgtgtgtgttcaactcacagagttgaacgatcctttacacagagcagacttgaaacactctttttgtggaatttgcaagtggagatttcagccgctttgagttcaatggtagaataggaaatatcttcctatagaaactagacagaatgattctcacaaaatcttttgtgatgtgtgcgttcaactcacagagtttaacttttcttctcatagagcagttaggaaacactctgtttgtaaagtctgcaagtggatattcagacctctttgaggccttcgttggaaacgggatttcttcatattctgctagacagaagaattcccagtaacttccttgtgttgtgtgtgttcaactcacagagttgaactttcatttacacagagcagatttgaaacactctttttgtggaatttgcaaatggagatttcaagcgctttgacgccaaaggcagaaaaggaaatatcttcgtataaaaactagacagaatcattctcagaaactgctctgcgatgtgtgcgttcaactctcagagtttaacttttcttttcattcagcagtttggaaacactctgtttgtaaagtctgcacgtggatattttgaccacttagaggccttcgttggaaacgggtttttttcctgcaaggctagacagaaaaattcccagtaacttcccgtgtgttgtgtgcattcaactcacagagttgaacgttcccttagacagagcagatttgaaaaactccttttgtgcaatttggaattggagatttcaagcgctttaatgtcaatggcagaaaagaaaataccttcgtttcaaaactagacagaatcattcccacaaactgcgttgtgatgtgttcgttcaactcacagagtttaacctttcttttcatagagcagttaggaaacagtctgtttgtcaattctgtaagtggatattctgacatcttgtggtcttcgttggaaacgggatttcttcatattctgctagacagaagaattctcagtaacttccttgtgttgtgtgtattcaactcacagagttgaacgatcctttacactgagcagacttgaaacattctttttgtggaatttgcaagtggagatttcagccgctttgaggtcaatggtagaataggaaatatcttcctatagaaattagacagaatgattctcagaaactcctttgtgatgtgtgtgttcaactcacagagtttaacctttcttttcatagagcagttagtaaacactctgtttataaagtctgcaagtggatattcagacccctttgaggccttcgttggaaacggcatttcttcatattatgctagacagaagaattctcagtaacttccttgtgttgtgtgtattcaagtgacagagttgaactttcatttagagagagcagatttgaaacagtgtttttgtggaatttgcaagtggagatttcaagcgctttggggccaaaggcagaaaaggaaatatcttcgtataaaaactagacagaatcattctcagaaactgctctgcgatgtgtgcgttcaactctcagagtttaacttttcttttcattcagcagtttggaaacactctgtttgtaaagtctgcacgtggatattttgaccatttagaggccttcgttggaaacgggtttttttcttgtaaggctagacagaagaattcccagtaacttccttgtgttgtgtacattcaactcacagggttgaacgttcccttagacagagcagatttgaaacactctttttgtgcaattggcaagtggagatttcaagcgctttaaggtcaatggcagaaaaggaaatatcttcgtttcaaaactagacagaatcattcccacaaactgcgttgtgatgtgttcgttcaactcacagagtttaacctttcttttcatagagcagttaggaaacagtctgtttgaaaattctgtaagtagatattctgacagcttgtggccttcgttggaaacgggatttctttatattctgctagacagaagaattctcagtaacttccttgtgttgtgtgtattcaactcacagagttgaacgatcctttacacagaccagacttgtaacactctttttgtggaatttgcaagtggagatttcagccgctttgaagtcataggtagaaaaggaaatatcttcgtataaaaactagacagaatgattctcagaaactcgtttgtgatgtgtgcgttcaactcacagagtttaacctttcttttcatagagcagttaggaaacactctgtttgtaaagtctgcaagtggatattcagacctctttgaggccttcgttggaaacggggttttttcatataaggctagacagaagaattcccagtaacttccttgtgttgtgtgtgttcaactcacagagttgaactttcagttacacagagcagatttgaaacactctttttgtggaatttgcaagtggagatttcaagcgctttgaggccaaaggcagaaaaggaaatatcttcgtttcaaaactagacagaatgattctcagaatctcctttgtgatgtgtgcgttcaactctcagagtttaacttttcttttcattcagcggtttggaaacactctgtttgttaagtctgcacgtggatattttgaccacttagaggccttcgttggaaacgggtatttttcatgtaaggctagacagaagaattcccagtaacttccttgtgttgtgtgcattcaactcacagagttgaacgttcccttagacagagcagatttgaaacactctatttgtgcaattggcaagtggagatttcaagcgctttaaggtcaatggcagaaaaggaaatatcttcgtttcaaaactagacagaatcattcccacaaactgcgttgtgatgtgttcgttcaactcacagagtttaacatttctgttcatagagcagttaggaaacactctgtttgtaaagtctgtaagtggatattcagacatcttgtggccttcgttggaaacgggatttcttcctattctgctagacagaagaattctcagtaacttccttgtgttgtgtgtattcaactcacagagttgaaggatcctttacagagagcaggcttgaaacactctttttgtcgaatttgcaagtggagatttcagccgctttgaggtcaatggtagaataggaaatatcttcttatagaaactagacagaaatgattctcagaaactcctttgtgatgtgtgtgttcaactcacagagtttaacctttcttttcatagagcagttaggaaacactctgtttgtaaagtctgcaagtggatattcagacctctttgaggccttcgttggaaacgggttgttttcatataaggctagacagaagaattctcagtaacttccttgtgttgtgtgtgttcaattcacagagttgaactttcatttacacagagcagatttgaaacactctttttgtggaatttgcaagtggagatttcacgcgctttgaggccaaaggcagaaaaggaaatatcttcgtttcaaaactagacagaatcattctcagaaactgctctgcgatgtgtgcgttccactctcagagtttaacttttcttttcattcagcagtttggaaacactctgtttgtaaagtctgcacgtggatattttgaccacttagaggccttcgttggaaacgggtttttttcctgtaaggctagacagaagatttcccagtaacttccttgtgttgtgtgcattcaactcacagagttgaacgttccgttagacagagcagatttgaaacactctatttgtgcaatttgcaagtgtagatttcaagcgctttaaggtcaatggcagaaaaggaaatatcttcgtttcaaaactagacagaacgattctcagaaactcctttgtgatgtgtgcgttcaactcacagagtttaacctttcttttcatagagcagttaagaaacactctgtttgtaaagtctgcaagtggatattcagaccactttgaggccttcgttggaaacgggatttcttcatattctgctagacagaagaattctcagtaacttccttgtgttgtgtgaattcaactcacagagttgaacgatcctttacacagagcagacttgaaacactcgttttgtggaacttgcaagtggagatttcagccgctttgtggtcaatagtagaataggaaatatcttcctatagaaactagacagaatgattctcagaaaatcctttgtgatgtgtgcgttcaactcacagagtttaacatttcttttcatagagcagttaggaaacactctctttgtaaagtctgcaagtggatattcagacctctttgaggccttcgttggaaacgggatttcttcatattctgctagacagaagaattctcagtaacttccttgtgttgtgtgtattcaactgacagagttgaactttcatttagagagagcagatttgaaacacggtttttgcggaatttgcaagtggagatttcaagcgctttggggccaaaggcagaaaaggaaatatcttcgtataaaaactagacagaatcattctcagaaactgctctgcgatgtgtgcgttcaactctcagagtttaacttttcttttcattcagcagtttggaaacactctgtttgtaaagtctgcacgtggataacttgaccacttagaggccttcgttggaaacgggtttttttcctgtaaggctagacagaagaattcccagtaacttccttgtgttgtgtacattcaactcacagagttgaacgttcccttagagcagatttgaaacactctttttgtgcaattggcaagtggagatttcaagcgctttaaggtcaatggcagtaaaagaaatatcttcgtttcaaaactagacagaatgattctcataaactcctttgtgatgtgtgcgttcaacacacagagtttaacctttctgttcatagagcagttaggaaacactctgtttgtaaagtctgtaagtggatattctgacatcttgttgccttcgctggaaacgggatttcttcatattctgctagacagaagaattctcagtaacttccttgtgttgtgtgtattcaactcacagagttgaacgatcctttacacagagcatacttgaaacactcttcttgtggaatgtgcaagtggagatttcagccgctttgaggtccatggtagaataggaaatatcttcctatagaaactagacagaatgattctcatgaactcctttgtgatgtgtgcgttcaactcacagagtttaacctttcttttcatagagcagttaggaaacactctgtttgtaaagtctgcaagtggatattcagacctccttgaggccttcgttggaaacgggatttcttcatattctgctagacagaagaattcccagtaacttccttgtgttgtgtgtgttcaactcacagagttgaactttcctttacacagagcagatttgaaacactctttttgtggaatttgcaagtggagatttcaagcgctttgaggccaaaggcagaaaaggaaatatcttcgtataaaaactagacagaatcattctcagaaactgctctgcgatgtgtgcgttcaactctcagagtttaacttttcttttcattcagcagtttggacacactctgtttgtaaagtctgcacgtggataatttgaccacttagaggccttcgttggaaacgggtttttttcatgtaaggctagacagaagaattcccagtaacttccttgtgttgtgtacggttcaactcacagagttgaacgttcccttagacagagcagatttgaaacactctttttgtgcaattggcaagtggagatttcaagcgctttaaggtcaatggcagaaaaggaaatatcttcgtttcaaaactagacagaatcattcccacaaactgcgttgtgatgtgttcgttcaactcacagagtttaacctttctgttcatagagcagttaggaaatactctgtaaagtctgtaagtggatattctgacatcttgtggccttcgttggaaacgggatttcttcatattctgctagacagaagaattctcagtaacttccttgtgttgtgtgtattcaactcacagagctgaacgatcctttacacagagcagacttgaaacactctttttgtggaatttgcaagtggagatttcagccgctttgaggtcaatggtagaaaaggaaatatcttcgtataaagactagacagaatgattctcagaaactcctttgtgatgtgtgcgttcaactcacagagtttaacttttcttttcatagagcagttaggaaacactctgtttgtaatgtctgcaagtggatattcagacctctttgaggccttcgttggaaacgggaattcttcatattatgctagacagaagaattctcagtaacttccttgtgttgtgtttattcaactcacagagttgaatgatcctttacacagagcagtcttgaaacactctttttgtggaatttgcaagtggagatttcagccgctttgaggtcaatggtagaataggaaatatcttcctatagaaaatagacagaatcattctcagaaactgctgcgtgatgtgtgcgttcaactctcagagtttaacttttcttttcattcagcggtttggaaacactctgtttgtaaagtctgcacgtggatattttgaccacttagaggccttcgttggaaacgggttttttttcatgtaaggctagacagaagaattcccagtaacttcccttgtgttgtgtgcattcaactcacagagttgaacgttcccttagacagagcagatttgaaacactctatttgtgcaatttgaaagtgtagatttcaagcgctttaaggtcaacggcagaaaaggaaatatcttcgtttcaaaactagacagaatcactcccacaaactgcgttgtgatgttttcgttcaactcacagagtttaacctttcttttcatagagcagttaggaaacagtctgtttgaaaattctgtaagtggatattctgacatcttgtggccttcgttggaaacgggatttcttcatattctgctagacagaagaattctcagtaacattccttgtgttgtgtgtattcaactcacagagttgaacgatcctttacacagagcagacttgaaacactctttttgtggaatttgcaagtggagatttcagccgctttgaggtcaatggtagaataggaaatatcttcctatagaaactagacaaaatgattctcataaactcctttgtgatgtgtgcgttcaactcacagagtttaacctttcttttcttagagcagttaggaaacactctgtttgtaaagtctgcaagtggatattcagacctctttgaggccttcgttggaaacgggatttcttcatattctgctagacagaagaattctcagtaacttccttgtgttgtgtgtattcaactgacagagttgaactttcatttagagacagcagatttgaaacactgtttttgtggaatttgcaagtggagatttcaagcgctttggggccaaaggcagaaaaggaaatatcttcgtataaaaactagacagaatcattctcagaaactgctgcgtgatgtgtgcgttcaactctcagagtttaacttttcttttcattcagcggtttggaaacactctgtttgtaaagtctacacgtggatattctgaccacttagaggccttcgttggaaacgggttttttgcatgtaaggctagacagaagaattcccagtaacttccttgtgttgtgtgcattcaactcacagagttgaacgttcccttagacagagcagatttgaaacactctatttgtgcaatttgcaagtgtagatttcaagcgctttaaggtcaatggcagaaaaggaaatatcttcgtttcaaaactagacagaatcattcccacaaactgtgttgtgatgtgttcgttcatctcacagagtttaacctttcttttcatagagcagttaggaaacactatgtttgtaaattctgtaagtggatattctgacatcttgtggccttcgttggaaacgggatttcttcatattctgctagacagaagaattctcaagtaacttccttgtgttgtgtgtattcaactcacagagttgaacgatcctttacacagagcagacttgaaacattctttttgtggaattggcaagtggagatttcagccgctttgaggtcaatggtagaataggaaatatcttcctatagaaactagacagaatgattctcagaaactcctttgagatgtgtgctctcaactcacagagtttaacctttcttttcatagagcagttaggaaacactctgtttgtaaagtctgcaagtggatattcagacctctttgaggccttcgttggaaacgggtttttttcatataaggctagacagaagaattctcaagtaacttccttgtgttgtgtgtattcaactgacagagttgaactttcatttagagagagcagatttgaaacactgtttttgtggaatttgcaagtggagatttcaagcgctttggggccaaaggcagaaaaggaaatatcttcgtataaaaactagacagaatcattctcagaaactgctctgcgatgtgtgcgttcaactctcagagtttaacttttcttttcattcagcagtttggaaacactctgtttgtaaagtctgcacgtggatattttgaccacttagaggccttcgttggaaacgggtttctttcctgtaaggctagacagaagaattcccagtaaattccttgtgttgtgtgcattcaactcacagagttgaacgttcccttagacagagcagatttgaaacactctatttgtgcaatttgcaagtgtagatttcaagcgctttaaaggtcaatggcagaaaagggaatatcttcgtttcaaaactagacagaatcattcccacaaactgcgttgtgatgtgttcgttcaactcacagagtttaacctttctgttcatagagcagttaggaaacactctgtttgtaaagtctgcaagtggatattcagacctcttgaaggccttcgttggaaacgggatttcttcatattctgctagacagaagaatacctagtaacttccttgtgttgtgtgcattcaactcacagagttgaacgatcctttacagagagcaggcttgaaacactctttttgtggaatttgcaagtggagatttcagccgctttgaggtcaatggtagaataggaaatatcttcctatagaaactagacagaatgattctcagaaactcctttgtgatgtgtgcgttcaactcacagagtttaacctttcttttcatagagcagttaggaaacaccctgtttgtaaagtctgcaagtggatattcagacatccttgaggctttcgttggaaacgggatttcttcatattatgctagacagaagaattcccagtaactcccttgtgttgtgtgtgttcaactcacagagttgaactttcatttacacagagcagatttgaaacactctttttgtggaatttgcaaatggaggtttcaagcgctttgaggccaaaggcagaaaaggaaatatcttcgtataaaaactagacagaatcattctcagaaactgctctgcgatgtgtgcgttcaactctcagagtttaacttttcttctcattcagaagtttggaaacactctgtttgtaaagtctgcacgtggataacttgaccacttagaggccttcgttggaaacgggtttttttcatgtaaggctagacagaagaattcccagtaacttccttgtgttgtgtgcattcaactcacagagttgaacgttcccttagacagagcagatttgaaacactctatttgtgcaatttgcaagtgtagatttcaagcgcttttaaggtcaacggcagaaaaggaaatatcttcgtttcaaaactagacagaatcattcccacaaactgcgttgtgatgtgttcgttcaactcacggactttaacctttctgttcatagagcagttaagaaacactctgtttgtaaagtctgcaagtggatattcagacctcctagaggccttcattggaaacgggatttcttcatattctgctagacagaagaattctcagtaacttccttgtgttgtgtgtattcaactcacagagttgaacgatcctttacacagagcagacctgtaacactctttttgtggaatttgcaagtggagatttcagccgctttgaagtcaaaggtagaaaaggaaatatcttcctataaaaactagacagaatgattctcagaaactcctttgtgatgtgtgcgttcaactcacagagttcaacctttcttttcatagagcagttgggaaacactctgtttgtaaactctgcaagtggatattcagacttctttgaggccttcgttggaagcgggatttcttcatattctgctagacagaagaattctcagtaactttccttgtgttgtgtgtattcaactcacagagttgaacgatcctttacacagagcagacttgaaacactctttttgtggaatttgcaagtggagatttcaagcgctttggggccaaaggcagaaaaggaaatatcttcgtataaaaactagacagaatcattctcagaaactgctctgcgatgtgtgcgttcaactctcagagtttaacgtttcttttcattcagcagtttggaaacactctgtttgtaaagtctgcacgtggatattttgaccacttagaggccttcgttggaaacgggtttttttcctgtaaggctagacagaagaattcccagtaacttccttgtgttgtgtacattcaactcacagagttgaacgttcccttagacagagcagatttgaaacacactttttgtgcaattggcaagtggagatttcaagcgctttaaggtcaatggcataaaaggaaatatcttcgtttcaaaactagacagaatcattcccacaaactgcgttgtgatgtgttcgttcaactcacagagtttaacctttcttttcatagagcagttaggaaacagtctgtttgtcaattctgtaagtggatattctgacatcttgtgaccttcgttggaaacgggatttcttcatattctgctagacagaagaattctcagtaacttccttgtgttgtgtgtattcaactcacagagttgaacgatcctttacacagagcagacttgaaacactctttttgtggaatttgcaagtggagatttcagccgctttgaggtcaatagtagaaaagtaaatatcttcgtagaaaaactagacagaatgattctcagaaactcctttgtgatgtgtgcgttcaactcacagagtttaacctttctgttcatagagcagttaggaaacactctgtttgtaaagtctgcaagtggatattcagacctctttgaggccttcgttggaaacgggaattcttcatattctgctagacagaagaattctctgtaacttccttgtgttgtgtgtattcaactgacagagttgaactttcatttagagagagcagatttgaaacactgtttttgtggaatttgcaagtggagatttcaagcgctttggggccaaaggcagaaaaggaaataacttcgtataaaaacttgacagaatgattctcagaaactcctttgtgatgtgtgtgttcaactcacagagtttaacctttcttttcatagagcagttaggaaacactctgtttgtaaggtctgcaagaggatattcagacctctttgaggccttcgttggaaacgggtttttttcatataaggctagacagaagaattcccagtaacttccttgtgttgtgtgtgttcaactcacagcagttgaactttcatttacacagagcagatttgaaacactctttttgtggaatttgcaaatggagatttcaagcgctttgaggccaaaggcagaaaaggaaatatcttcgtttcaaaactagacagaatcattctcagaaactgctctgcgatgtgtgcgttcaactctcagagtttaacttttcttgtcattcagcagtttggaaacactctttttgtaaagtctgcacgtggatattttgaccacttagaggccttcgttggaaacgggtttttttcatgtaaggctagacagaagaattctcagtaacttccttgtgttgtgtgtattcaactcacagagttgaacgatcctttacacagagcagacttgaaacactctttttgtggaatttgcaactggagatttcagccgctttgaggtcaaaggtagaaaaggaaactatcttcgtagaaaaattagacagaatgattctcagaaacttctttgtgatgtgtgcgttcaactcacagagtttaacctttcttttcatagagcagttaggaaacactctgtttgtaaagtctgcaagtggatattcagacctctttgaggccttcgttggaaacgggatttcttcatactatgctagacacaagaattcccagtaacttccttgtgttgtgtgtgttcaactcacagagttgaactttcatttacacagagcagatttgaaacactctttttgtggaaattgcaaatggagatttcaagcgctttgaggccaaaggcagaaaaggaaatatcttcgtataaaaactagacagaatcattctctgaaactgctctgcgatgtgtgccttcagcgctcagagtttaacttttcttttcattcagcagtttggaaacactctgtttctaaagtctgcacgtggatattttgaccacttagaggccttcgttggaaacgggtttttgtcatgtaaggctagacagaagaattcccagtaactcccttgtgttgtgtacattcaactcacagagttgaacgttcccttagacagagcagatttgaaacactctttttgtgcaattggcaagtggagatttcaagcgcttaaggtcaatggcagaaaaggaaatatttccgtttcaaaactagacagaaatgattctcagaaactcctttgtgatgtgtgtgttcaactcacagagtttaacctttcttttcatagagcagttaggaaacactctgtttgtaaagtctgcaagtggatattcagacctccttgaggccttcgttggaaacgggatttcttcatattctgctagacagaagaattctcagtaacttccttgtgttgtgtgtattcaactcacagagttgaacgatcctttacacagagcagacttggaacactctttttgtggaattttcaagtggagatttcagccgcgttgaggtcaatggtagaaaaggaaatatcttcgtataaaaactagacagaacgattctcagaaactcctttgtgatgtgtgcgttcaactcacagactttaacctttcttttcatagagcagttaggaaacactctgtttgtaaagtctgcaagtggatattcagacctctttgaggccttcgttggaaacgggatttcttcatattctgctagacagaagaattcctcagtaactttcttgtgttgtgtgtattcaactgacagagttgaactttcatttagagagaccagatttgaaacactgtttttgtggaatttgcaagtggagatttcaagcgctttggggccaaaggcagaaaaggaaatatcttcgtataaaaactagacagaatcattctcagaaactgctgcgtgatgtgtgcgttcaactctcagagtttaacttttcttttcattcagcggtttggaaacactctgtttgtaaagtctgtacgtggatattttgaccacttagaggccttcgttgcaaacgggttttttgcatgtaaggctagacagaagaattcccagtaacttccttgtgttgtgtgcattcaactcacagagttgaacgttcccttagacagagcagatttgaaacactctatttgtgcaatttgcaagtgtagatttcaagcgctttaaggtcaatggcagaaaaggaaatttcttcgttttaaaactagacagaatcattcccacaaactgcgttgtgatgtgttcgttcaactcacagagtttaacctttcttttcatagagaagttaggaaacactctgtttgtaaagtctgcaagtggatattcagacctccttgaggccttcgttggaaacgggatttcttcatattctgctagacagaagaattctcagaatcttccttgtgttgtgtgtattcaactcacagagttgaacgatggtttacacagagcagatttgaaacactcatttggtggaatttgcaagtggagatttcagccgcattgaggtcaatggtagaaaaggaaatatcttcgtataacaactagacagaatgattctcataaactcctttgtgatgtgtgcgttcaactcacagagtttaacctttcttttcatagagcagttaggaaacactctgtttgaaaagtctgcaagtggatattcagaccaccttgaggccttcgttggaaacgggatttcttcatattctgctagacagaagaattctctgtaacttccttgtgttgtgtgtattcaactgacagagttgaactttcatttagagagagcaggtttgaaacactgtttttgtggaatttgcaagtggagatttcaagcgctttggggcaaaaggcagaaaaggaaatatcttcgtataaaaactagacagaatcattctcagaaactgcgctgcgatgtgtgcgttgaactctcagagtttaacttttcttttcattcagcagtttggaaacactctgtttgtaaagtctgcacgtggatattttgaccacttagagtccttcgttggaaacgggtttttttcctgtaaggctagacagaagaattcccaggaacttccttgtgttgtgtacattcaactcacagagttgaacgttcccttagacagagcagatttgaaacactctttttgtgcaattggcaagtggtgatttcagccgctttgaggtcaatggtaaaaaaggaaataacttcctataaaaactagacagaatcattaccacaaactgcgttgtgatgtgttcgttcaactcacagagtttaacctttctgttcatagagcagttaggaaacactctgtttgtaaagtctgtaagtggatattctgacatcttgtggccttcgttggaaacgggatttcttcatattctgctagacagaagaattctcagtaacttccttgtgttgtgtgtattcaactcacagagttgaacgatcctttacacagagcagacttcaaacactctttttgtggaatttgcaagtggagatttcagccgctttgaggtcaatggtagaataggaaatatcttcctatagaaactagacagaatgattctgagaaactcctttgtgatgtgtgcattcaactcacagagtttaacctttcttttcatagagcagttaggaaacactctgtttgtaaagtctgcaagtggatattcagacctccttgaggccttcgttggaaacgggatttcttcatattatgctagacagaagaattttcagtaacttccttgtgttgtgtgtattcaactcacagagttgaacgatcctttacacagagcagacttgaaacactctttttgtggaatttgcaagtggagatttcagccgctttgagttcaatggtagaataggaaatatcttcctatagaaactagacagaatcattctcagaaactgctctgcgatgtgtgcgttcaactctcagagtttaacttttcttttcattcagcagtttggaaacactctgttttttaaagtctgcacgtggatattttgaccacttagaggccttcgttggaaacgggtttttttcctgtaaggctagacagaagaattcccaataacttccttgtgttgtgtacattcaactcacagagttgaacgttcccttagacagagcagatttgaaacactctttttgtgcaattggcaagtggagatttcaagcgctttaaggtcaatggcagaaaaggaaatatcttcgtttcaaaactagacagaatgattctcagaaactcctttgtgatgtgtgcactcaactcacagagtttagcctttcttttcatagagcagttaggaaacactctgtttgtaaagtctgcaagtggatattcagacctctttgaggccttcgtaggaaatgggatttcttcatattatgctagacagaagaattctcagtaacttccttgtgttgtgtgtattcaactcacagagttgaacgatcctttacacagagcagacttgaaacactctttttctggaatttgcaagtggagatttcagcctctttgaggtcaatggtagaaaaggaaatatcttcgtataaaaactagacagaatgattctcagaaactcctttgtgatgtgtgcgtgcaactcacagagtttaacctttcttttcatagagcagttaggaaacactctgtttgtaaagtctgcaagtggatattcagacatctttgaggctttcgttggaaacgggattttttcatattctgctaggcagaagaattctcagtaacttccttgtgttgtgtgtattcaactgacagagttgaactttcatttggagagagcagatttgaaacactgtttttgtggaatttgcaagtggagatttcaagcgctttggggccaaaggcagaaaaggaaatatcttcgtataaaaactagaaagaatcattctcagaaactgctctgcgatgtgtgcgttcaactctcagagtttaacttttcttttcattcagcagtttggaaacactctgtttggaaagtctgcacgtggatattttgaccacttagaggccttcgttggaaacgggtttttttcctgtaaggctagacagaagaattcccagtaacttccttgtgttgtgtgtgttcaactcacagagttgaactttcatttacacagagcagatttgaaacactctttttgtgcaattggcaagtggagatttcaagcgctttaaggtcaatggcagaaaaggaaatatcttcgtttcaaaactagacagaatgattctcagaaacttctttgtgatgtgtgcgttcaactcacagagtttaacctttcttttcatagaggagttaggaaacactctgtttgtaaagtctgcaagtggatattcagacctctttgaggccatcgttggaaacgggatttcttcatactatgctagacagaagaattctcagtaacttccttgtgttgtgtgtattcaactcacagagttgaacgatcctttacacagagcagacttgtaacactctttttgtggaatttgcaagtggagatttcagccgcgttgaggtcaatggtagaaaaggaaatatcttcgtataaaaactagacagaatgattctcagaaactcctttgtgatgtgtgcgttcaactcacagagtttaacctttcttttcatagagcagttaggaaacactccgtttctaaagtctgcaagtggatattcagacctctttgaggccttcgttggaaacgggtttttttcatataaggctagagagaagaattcccagtaacttccttgtgttgtgtgtgttcaactcacagagttgaactttcatttacacagagcagatttgaaatactctttttgtggaatttgcaagtggagatttcaagcgctttgaggccaaaggccgaaaaggaaatatcttcgtataaaaactagacagaatgattctcagaaatttctttgtgatgtgtgcgttcaactcacagagtttaacttttcttttcattcagcagtttggaaacactctgtttgtaaagtctgcaagtggatattcagacctctttgaggccttccttggaaacgggttttttttcatgtaaggctagacagaagaattcccagtaacttccttgtgttgtgtacattcaactcacagagttgaacgttcccttagacaaagcagatttgaaacactctttttgtgcaattggcaagtggagatttcaagcgctttaaggtcaatggcagaaaaggaaatatcttcgtttcaaaactagacagaatgattctcagaacctcctttgtgatgtgtgcgttcaactcacagagttgaacctttcttttcatagagcagttaggaaacactctgtttgtaaagtctgcaagtggatattcagacatccttgaggctttcgttggaaacgggatttcttcatattctgctagaaagaagaattctcagtaacttctttgtgttgtgtttattcaactcacagagttgaacgatactttacacagagcagacttgatacactcgttttgtggaatttgcaagtggagatttcagccgctttgaggtccatggtagaaaaggaaatatcttcgtataaaaacttgacagaatgattctcagaaactcctttgtgatgtgtgcgttcaactcacagagtttaacctttcttttcatagagcagttaggaaacactctgtttgtaaagtctgcaagtggatattcggacctccttgaggccttctttggaaacgggatttcttcttattatgctagacagaagaattctcagtaacttccttgtgttgtgtgtattcaactcacagagttgaactttcatttagagagagcagatttgaaacacagtttttgtggaatttgcaagtggagatttcaagcgctttggggccaaaggcagaaaaggaaatatcttcgtataaaaactagacagaatcatactcagaaactgctgcgtgatgtgtgcgttgaactctcagagtttaacttttcttttcattcagcggtttggaaacactctgtttgtaaagtctgcacgtggatattttgaccacttagaggccttcgttggaaacgggtttttttcatgtaaggctagacagaagaattcccagtaacttccttgtgttgtgtacattcaactcacagagttgaacgttcccttagacagagcagatttgaaatactctttttgtgcaattggcaagtggagatttcaagcgctttaaggtcaatggcagaaaaggaaatatcttcgtttcaaaactagacagaatcattcccaaaaactgcgttgtgatgtgttcgttcatctcacagagtttaacctttcttttcatagagcagttaggaaacactctgtttgtaaattctgtaagtggatattctgacatcttgtggccttcgttggaaacgggatttcttcatattctgctagacagaaaaattctcagtaacttccttgtgttgtgtgtattcaactcacagagttgaacgatcctttacacagagcagacttgaaacactctttttgtggaatttgcaagtggagatttcagccgctttgaggtcaatggtagaaaaggaaatatcttcctatagaaactggacagaaagattctcagaaactcctttgtgatgtgtgcgttcaactcacagagtttaacctttcttttcatagagcagttaggaaacactctgtttgtaaagtctgcaagttcatattcagacctctttgaggccttcgttggaaacgggtttttttcatataaggctagagagaagaattcccagtaacttccttgtgttgtgtgtgttcaactcacagagttgaactttcatttacacagagcagatttgaaacactctttttgtggaatttgcaaatggagatttcagccgcgttgaggtcaacggtagaaaaggatatatcttcgtttcaaaactagacagaatcattctcagaaactgctctgcgatgtgtgcgttgaactctcagagtttaacttttcttttcattcagcagtttggaaacactctgtttgtaaagtctgcacgtggatattttgaccacttagaggcctttgttggaaacgggtttttttcctggaaggctagacagaagaattcccagtaactttccttgtgttgtgtgcattcaactcacagagttgaacgttcccttagacagagcagatttgaaacactctatttgtgcaattggcaagtgtagatttcaagcgctttaaggtcaatggcagaaaaggaaatatcttcgtttcaaaactagacagaatgattctcagaaactcctttgtgatgtgtgccttcaactcacagagtttaacttttcttttcatagagcagttaggaaacactctgtttctaaagtctgcaagtggatattcagacctctttgaggccttcgttggaaacgggatttcttcatattctgctagacagaagaattctcagtaacttccgtgtgttgcgtgtattcaactcacagagttgaacgatcctttacacagagcagacttgaaacactctttttgtggaatttgcaagtggagatttcagccgctttgaggtcaaagttagaaaggaaatatcttcctataaaaactagacagaatgattctcagaaactcctttgtgatgtgtgcgttcaactcacagagttcaacctttcttttaatagagcagttgggaaacactctgtttgtaaagtctgcaagtggatattcagacttctttgaggccttcgttggaagcgggctttcttcatattctgctagacagaagaattcccagtaacttccatgtgttgtgtgtgttcaactcacagagttgaacgttcccttagacagagcagatttgaaacactctttttgtggaatttgcaagtggagatttcaagcgctttgaggccaaaggcagaaaaggaaatatcttcgtataaaaactagacagaatcattctcagaaactgctgcgtgatgtgtgcgttcaagtctcagagtttaacttttcttttcattcagcggtttggaaacactctgtttgtaaagactgcacgtggatattttgaccacttagaggccttcgttggaaacgggttttttttcatgtaaggctagacagaagaattcccaggaacttccttgtgttgtgtacattcaactcacagagttgaacgttcccttagacagagcagatttgaaacactctttttgtgcaattggcaagtggtgatttcagccgctttgacgtcaatggtagaaaaggaaatatcttcgtataaaaactagacagaatcattcccacaaactgcgttgtgatgtgttcgttcaactcacagagtttaacctttcttttcatagagcacttaggaaacagtctgtttgtaaattctgtaagtggatattctgacatcttgtggccttcgttggaaacgggatttcttcatattctgctagacagaataattctcagtaagttccttgttttgtgtgtattcaactcacagagttgaaggatcctttagagagagcaggcttgaaacactctttttgtcgaaattgcaagtggagatttcagccgctttgaggtcaatggtagaataggaaatatcttcctatagaaactagacagaatgattctcagaaactcctttgtgatgtgtgtgttcaactcacagagtttaacctttcttttcatagagcagttaggaaacactctgtttgtaaagtctgcaagtggatattcagacctctttgaggccttctttggaaacgggatttttcatataaggctagacagaagaattcccagtaacttccttgtgttgtgtgtgttcaactcacagagttgaactttcatttacacagagcagatttgaaacactctttttgtggaatttgcaggtggagatttcaagcgctttgaggccaaaggcagaaaaggaaatatacttcgtataaaaactagacagaatcattctcagaaactgctctgcgatgtgtgcgttcaactctcagagtttaacttttcttttcattcagcagtttggaaacactctgtttgtaaagtctgcacgtggataatttgaccacttagaggccttcgttggaaacgggtttttttcatgtaaggatagacagaagaattcccagtaacttcccttgtgttgtgtgcattcaactcacagagttgaacgttcccttagacagagcagatttgaaacactctatttgtgcaatttgcaagtgtagatttcaagcgctttaaggtcaatggtagaaaaggaaatatcttcgttttaaaactagacagaatcactcccacaaactgcgttgtgatgtgttcgttcaactcacagagtttaacctttcttttcatagagcagttaggaaacagtctgtttgaaaattctgtaagtggatattctgacatcttgtggccttcgttggaaacgggatttcttcatattctgctagacagaagaattctcagaatcttccttgtgttgtgtgtattcaactcacagagttgaacgatcctttacacagagcagatttgaaacactctttttgtggaatttgcaagtggagatttcagccgctttgaggtcaatggtagaaaaggaaatatcttcctataaaaactagacagaatgattctcagaaactcgtttgtgatgtgtgcgttcaactcacagagattaacttttcttttcatagagcagttaggaaacactctgtttgtaaagtctgcaagtggatattcagacctctttgtggccttcgttggaaacgggatttcttcatattatgctagacagaagaattctcagtaacttccttgtgttgtgtgtattcaactgacagagttgaactttcatttagagagagcagatttgaaacactgtttttgtggaatttgcaagtggagatttcaagcgctttggggccaaaggcagaaaaggaaatatcttcgtataaaaagtagacagaatcattctcagaaactgctgcgtgatgtgtgcgttcaactctcagagtttaacttttcttttcattcagcagtttggaaacactctgtttgtaaagtctgcacgtggaaattttgaccacttagaggccttcgttggaaacgggtttttttcatgtaaggctagacagaagaattcccagtaacttccttgtgttatgtgcattcaactcacagagttgaacgttcccttagacagagcagatttgaaacactctatttgtgcaatttgcaagtgtagatttcaagcgctttaaggtcaatggcagaaaaggaaatatcttcgtttcaaaactagacagaatcattcccacaaactgcgttgtgatgtgttcgttcaactcacagagtttaacctttcttttcatagagcagttaggaaacagtctgtttgtaaattctgtaagtggatattctgatatcttgtggccttcgttggaaacgggatttcttcatattctgctagacagaagaattctcagtaacttctttgtgttgtgtgtattcaactcacagagttgagcgatcctttacacagagcagacttgaaacactcgttttgtggaatttgcaagtggagatttcagccgctttgaggtcaatggtagaaaaggaaatatcttcgtataaaaactagacagaatgattctcagaaactcctttgtgatgtgtgcgttcaactcacagagtttaacctttcttttcatagagcagttaagaaacactctgtttgtaaagtctgcaagtggatattcagacctctttgaggccttcgttggaaacgggatttcttcatattctgctagacagaagaattcccagtaacttcccttgtgttgtgtgtgttcaactcacagagttgaactttcatttacacagagcagatttgaaacactctttttgtggaatttgcaagtggagatttcaagcgctttcaggccaaaggcagaaaaggaaatatcttcgtataaaaactaggcagaatcattctcagaaactgctctgcgatgtgtgcgttcaactctcagagtttaacttttcttttcattcagcagtttggaaacacactgtttgtaaagtctgcacgtggatattttgaccacttagaggccttcgttggaaacgggtttttttcctgtaaggctagacagaagaattcccagtaacttccttgtgttgtgtacattcaactcacagagttgaacgttcccttagacagagcagatttgaaacactctttttgtgcaattggcaagtggagatttcaagcgctttgaggtcaatggcagaaaaggaaatatcttcgtttcaaaactagacagaatgattctcagaaactcctttgtgatgtgtgcgttcaactcacagagtttaagttttcttttcatagagcagttaggaaacactctgtttgtaaagtctgcaggtggatattcagacctctttgaggccttcgttggaaaagggatttcttcatattatgctagacagaataattctcagtaacttccttgtgttgtgtgtattcaactcagagttgtacgatcctttacagagagcagacttgaaacactctttttgtggaatttgcaagtggagatttcagccgctttgaggtcaatggtagaactaggaaatatcttcctatagaaactagacagaatgattctcagaaactcctttgtgatgtgtgtgttcaactcacagagtttaacctttcttttcatagagcagttagtaaacactctgtttataaagtctgcaagtggatattcagagccctttgtggccttcgttggaaacggggtttcttcatattatgctagacagaagaattcccagtaacttccttgtgttgtgtgtgttcaactcacagagttgaactttcatttacacagagcagatttgaaacactctttttgtggaatttgcaagtggagatttcaagcgctttaaggccaaaggcagaaaaggaaatatcttcgtttcaaaactagacagaatcattctcagaaactgctgcgtgatgtgtgcgttcaactctcagagtttaacttttcttttcattcagcggtttggaaacactctgtttgtaaagtctgcaagtggatattcagacctctttgaggccttcgttggaaacgggatttcttcatattatgctagacagaagaattcccagtaacttccttgtgttgtgtacattcaactcacagagttgaacgttcccttagacagagcagatttgaaacactttttttgtgcaattggcaagtggtgatttcaaccgctttgaggtcaatggtagaaaaggaaatatcttcgtataaaaactagacagaatcattcccacaaactgcgttgtgatgtgttcgttcaactcacagagtttaacctttctgttcatagagcagttaggaaacactctgtttgtaaagtctgcaagtggatattcagacctccttgaggctttcgttggaaacgggatttgttcatattctgctagacagaagaattctcagtaacttccttgtgttgtgtgtattcaactcacagagttgaacgatcctttacacagagcagacttgaaacactctttttctggaatttgcaagtggagatttcagccgctttgaggtcaatggtagaaaaggaaatatcttcgtataaaaactagacagaatgattctcagaaactcctttgtgatgtgtgcgttcaactcacagagtttaacctttcttttcatagagcagttaggaaacactctgtttgtaaagtctgcaagtggatattcagacctctttgaggccttcgttagaaacgggatttcttcatattatgctagacagaagaattctcagtaacttccttgtgttgtgtgtattcaactgacagtgttgaactttcatttagagagagcagatttgaaacactgtttttgtggaatttgcaagtggagatttcaagcgctttggggccaaaggcagaaaaggaaatatcttcgtataaaaactagacagaatcattctcagaaactgctgcgtgatgtgtgcgttcaactctcagagtttaacttttcttttcattcagcggtttggaaacactctgttcgtaaagtctgcacgtggatattttgaccacttagaggccttcgttggaaacgggtttttttcatgttaggctagacagaagaattcccagtaacttccttgtgttgtgtacattcaactcacagaggtgaacgttcccttagacagagcagatttgaaacactctttttgtgcaattggcaagtggagatttcaagcgctttaaggtcaatggcagaaaaggaaatatcttcgtttcaaaactagacagaatgattctcagaaactcctttgtgatgtgtgcattcaactcacagagtttaacctttcttttcatagagcagttaggaaacactctgtttgtaaagtctgcaagtggatattcagacctccttgaggccttcgttggaaacgggatttcttcatattctgctatacagaagaattctcagaaacttccttgtgttgtgtgtattcaactcacagagttgaacgatcgtttacacagagcagacttgagacactctttttgtggaatttgtaagtggagatttcagccgctttgaggtcaatggtagaaagggaaatatcttcatataaaaactagacagaatgattctcagaacctcctttgtgatgtgtgcgttcaactcacagagtttaacctttcttttcatagagcagttaggaaacactctgtttgtaaagtctgcaagtggatattcagacctctttgaggccttcgttggaaacgggatttcttcatattatgctagacagaagaattctcagtaacttccttgtgttgtgtgtattcaactcacagagttgaactttcatttacacagagcagatttgaaacactctttttgtggaatttgcaagtggagatttcaagcgctttgaggccaaaggcagaaaaggaaatatcttcgtttcaaaactagacagaatcattctcagaaactgctctgcgatgtgtgcgttcaactctcagagtttaacttttcttttcattcagcagtttggaaacactctgtttgtaaagtctgcacgtggataacttgaccacttagaggccttcgttggaaacgggtttttttcctgtaaggctagacagaagaattcccaggaacttccttgtgttgtgtacattcaactcacagagttgaacgttcccttagacagagcagatttgaaacactctttttgtgcaattggcaagtggtgatttcagccgctttgaggtcaatggtagaaaaggaaatatcttcgtttcaaaaccagacagaatgattctcagaaactcctttgtgatgtgtgcgttcaactcacagagtttaacctttcttttcatagagcagttaggaaacactctatttgtaaagtctgcaagtggatattcagacatccttgagtctttctttggaaacgggatttcttcatattctgctagaaagaataattctcagtaacttccttgtgttgtgtgtattcaactcacagagttgaacgatcctttacacagagcagacttgaaacactctttttgtggaatttgcaattggagatttcagccgctttgaggtcaatggtagaataggaaatatcttcctatagaaactagacagaatgattctcagaaactcctttctgatgtgtgtgttcaactcacagagtttaaactttcttttcatagagcagttaggaaacactctgtttataaagtctgcaagtggatattcagacccctttgtggccttcgttggaaacgggatttcttcatattatgctagacagaagaattctcagtaacttccttgtgttgtgtgtattgaactcgcagagttgaacgatcctttacacagagcagacttgaaacactctttttgtggaatttgcaagtggagatttcagccgcattgaggtcaatagtagaaaaggaaatatcttcgtagaaaaactagacagaatcattctcagaaactgctctgcgatgtgtgcgttcaactctcagagtttaacttttcttttcattcagcagtttggaaacactctgtttgtaaagtctgcacgtggatattttgaccacttagaggccttcgttggaaacgggtttttttcctgtaaggctacacagaggaattcccagtaacttccttgtgttgtgtacattcaactcacagagttgaacgttcccttagacagagcagatttgaaacactctttttgtgcaattggcaaatggagatttcaagcgctttaagttcaatggcagaaaaggaaatatcttcgtttcaaaactagacagaatcattcccacaaactgcgttgtgatgtgttcgttcaaatcacagagtttaacctttctgttcatagagcagttaggaaacactctgtttgtaaagtctgtaagtggatattctgacatcttgtggccttcgttggaaacgggatttcttcatattctgctagacagaagaattctcagtaacttccttgtgttgtgtgtattcaactcacagagttgaacgatcctttacacagagcagacttgaaacactctttttgtggaatttgcaagtggagatttcagccgctttgaggtcaatggtagaataggaaatatcttcctatagaaaatagacagaatgattctcagaaactcttttatgatgtgtgcgttcaactcacagagtttaacttttcttttcatagagcagttaggaaacactctgtttgtaaactctgcaagtggatattcagacctctttgaggccttcgttgcaaacgggatttgttcatattatgcctgacagaagaattctcagtaacttccttgtgttgtgtgtattcaactcacagagttgaactttcattcacacagagcagatttgaaacacgctttttatggaatttgcaagtggagatttcaagcgctttgaggccaaaggcagaaaaggaaatatcttcgtttcaaaactagacagaatcattctcagaaactgctctgcgatgtgtgcgttcaactatcagagtttaacttttcttttcattcagcagtttggaaacactctgtttgtaaagcctgcacgtggataatttgaccacatagaggccttcgttggaaacgggtttttttcatgtaaggctagacagaagaattcccagtaacttccttgtgttgtgtgcattcaactcacagagttgaacgttcccttagacagagcagatttgaaacactctatttgtgcaatttgcaagtgtagatttcaagcgctttaaggtcaatggcagaaaaggaaatatcttcgtttcaaaactagacagaatgattctcagaaactcctttgtgatgtgtgcgttcaactcacagagttcaacctttcttttcctagagcagttgggaaacactctgtttgtaaagtctgcatgtggatattcagacatccttgaggctttcgttggaaacgggatttcttcatattctgctagaaagaagaattctcagtaacttccttgtgttgtgtgtattcaactcacagagttgaacgatcctttacagagagcagacttgacacactctttttgtggaatttgcaagtggagatttcagccgctttgtggtcaatggtagaataggaaatatcttcctatagaaactagacagaatgattctcagaaactcctttgtgatgtgtgcgttcaactcacagagtttaacctttcttttcatagagcagttaggaaactctctgtttgtaaagtctgcaagtggatattcagacatccttgaggctttcgttggaaacgggatttcttcatattctgctagaaagaagaattcccagtaacttccttgtgttgtgtgtgttcaactcacagagttgaactttcatttacacagagcagatttgaaacactctttttgtggaatttgcaagtggagatttcaagcgctttgaggccaaaggcagaaaagtaaatatcttcgtttcaaaactagacagaatcattctcagaaactgctgcgtgatgtgtgcgttcaactctcagagtttaacttttcatttcattcagcggtttggaaacactctgtttgtaaagtctgcacgtggaaattttgaccacttagaggccttcgttggaaacgggtttttttcatgtaaggctagacagaagaattcccagtaacttcccttgtgttgtgtacattcaactcacagagttgaacgttcccttagacagagcagatttgaaacactctttttgtgcaattggcaaatggagatttcaagcgctttaaggtcaatggcaggaaaggaaatatcttcgtttcaaaactagacagaatcattcccacaaactgcgttgtgatgtgttcgttcaactcacagagtttaacctttctgttcatagagcagttaggaaacactctctttgtaaagtctgtaagtggatattctgatatcttgtggccttcgttggaaacgggatttcttcatattatgctagacagaagaattctcagtaacttccttgtgttttgtgtattcaactcacagagttgaacgatcctttacacagagcagactagaaacattctttttgtggaatttgcaagtggagatttcagccgctttgaggtcaatcgtagaataggaaatatcttcctatagaaactagacagaacgattctcagaaactcctttgtgatgtgagcgttcaactcacagagtttaacctttcttttcttagagcagttaggaaacactctgtttgtaaagtctgcaagtggatattcagacctctttgaggccttcgttggaaacgggatttcttcatattctgctagacagaagaattctcagtaacttcccttgtgttgtgtgtattcaactgacagagttgaactttcatttagagagagcagatttgaaacactgtttttgtggaatttgcaagtggagatttcatgcgctttggggccaaaggcagaaaaggaaatatcttcgtataaaaactagacagaatcattctcagaaactgctctgcgatgtgtgcgttcaactctcagagtttaacttttcttttcattcagcagtttggaaacactctgtttgtaaagtctgcacgtggataacttgaccacttagaggccttcgttggaaacgggttttttttcctgtaaggctagacagaagaattcccaggaacttccttatgttgtgtacattcaactcagagagttgaacgttcccttagacagagcagatttgaaacactctttttgtgcaattggcaagtggtgatttcagccggtttgaggtcaatggtagaaaaggaaatatcttcgtataaaaactagacagaatcattcccacaaactgcgctgtgatgtgttcgttcaactcacagagtttaacctttcttttcatagagcagttaggaaacagtctgtttgtaaattctgtaagtggatattctgacatcttgtggccttcgttggaaacgggatttcttcatatgctgctagacagaagaattctcagtaacttccttttgttgtgtgtattcaactcacagagttgaacgatcctttacacagagcagacttgaaacactctttttgtggaatttgcaagtggagatttcagccgctttgaggtcaatcgtagaaaaggaaatatcttcgtagaaaaactagacagaatgattctcagaaactcctttgggatgtgtgcgttcaactcacagagtttaacctttcttttcatagagcagttaggaaacactctgtttgtaaagtctgcaagtggatattcagacctctttgaggccttcgttggaaacgggatttcttcatactgtgctagacagaagaattctcagtaacttccttgtgttgtgtgtattcaactcacagagttgaacgatcctttacacagagcggacttgaaacacactttttgtggaatttgcaagtggagatttcagccgcgttgaggtcaatggtagaaaagcaaatatcttcgtataaaaaatagacagaatcattctcagaaactgctctgcgatgtgtgcgttcaactctcagagtttaactttgcttttcattcagcagtttggaaacactctgtttgtaaactctgcacgtggataatttgaccacttagaggccttcgttggaaacgggtttttttcatgtaaggctagacagaagaattcccagtaacttccttgtgttgtgtacattcaactcacagagttgaacgttccctcagacagagcagatttgaaacactctttttgtgcaattggcaaatggagatttcaagcgctttaaggtcaatggcagaaaaggaaatatcttcgtttcaaaactagacagaatcattcccacaaactgcgttgtgatgtgttcgttcaactcacagagtttaacctttctgttcatagagcagttaggaaacagtctgtttgtcaattctgtaagtggatattctgacatcttgtggccttcgttggaaacgggatttcttcatattctgctagacagaagaattctcagaaacttcgttgtgttgtgtgttttcaactcacagagttcaacgatcctttacacagagtagacttgaaacactctttttgtggaattggcagggtggagatttcagccgctttgaggtcaatggtagaaaaggaaatatcttcgtataaaaactagacagaacgattctcagaaactccattgtgatgtgtgcgttcaactcacagagtttaacctttcttttcatagagcagttaggaaacactctgtttgtaaagtctgcaagtggatattcagacctccttgaggccttcgttggaaacgggatttcttcatattctgctagacagaagaattcccagtaacttccttgtgttgtgtgtgttcaactcacagtgttgaactttcatttacacagagcagatttgaaacactctttttgtggaatttgcaagtggagatttcaagcgctttgaggccaaaggcagaaaaggaaatatcttcgtttcaaaactagacagaatcattctcagaaactgctctgcgatgtgtgcgttcaactctcagagtttaacttttcttttcattcagcagtttggaaacactctgtttgtaaagtctgcacgtggatattttgaccacttagaggccttcgttggaaacgggtttttttcctgtaaggatagacagaagaattcccagtaacttccttgtgttgtgtgcattcaactcacagagttgaacgttcccttagacagagcagatttgaaacactctatttgttcaatttgcaagtgtagatttcaagcgctttaaggtcaatgacagaaaaggaaatatcttcgtttcaaaactagacagaatcattcccacaaactgcgttgtgatgtgttcgttcaactcacagagtttaacctttctgttcatagagcagttaggaaacactctgtttgtaaagtctgcaagtggatattcagacctccttgaggccttcgttggaaaagggatttcttcatattctgctagacagaagaattctcagaaacttccttgtgttgtgtgttttcaactcacagagttgaacgatcctttacacagagcagacttgaaacactccttttgtggaatttgcaagtggagatttcagccgctttgaggtcagtggtagattaggaaatatcttcctatagaaactagacagaatgattctcagaaactcctttgtgatgtgagcgttcaactcacagagtttaacctttcttttcatagagcagttaggaaacactctgtttgtaaagtctgcaagtggatattcagacatccttgaggctttcgttggaaacgggatttcttcatattctgctagaaagaagaattctcagtaacttccttgtgttgtgtgtattcaactgacagagttgagctttcatttggagagagcagatttgaaacactgtttttgtggaatttgcaagtggagatttcaagcgctttggggccaaaggcagaaaaggaaatatcttcgtataaaaactagacagaatcattctcagaaactgctctgcgatgtgtgcgttcaactctcagagtttaacttttcttttcattcagcagtttggaaacactctgtttgtaaagtctgcacgtggatattttgaccacttagaggccttcgttggaaacgggtttctttcctgtaaggctagacagaagaattcccagtaacttccttgtgttgtgtacattcaactcacagagttgaacgttcccttagacagagcagatttgaaacactctttttgtgcaattggcaagtggagatttcaagcgctttgaggccaaaggcagaaaaggaaatatcttcgtataaaaactagacagaatcattcccacaaactgcgttgtgatgtgttcgttcaactcacagagtttaacctttccgttcatagagcagttaggaaacactctgtttgtaaagtctgtaagtggatattctgacatcttgtggccttcgttggaaacgggatttcttcatattatgctagacagaagaattctcagtaacttccttgtgttgtgtgtattcaactcacagagttgaacgattctttacacagagcagacttgaaacactctttttgtggaatttgcaagtggagatttcagccactttgaggtcaatagtagaaaaggaaatatcttcgtagaaaaactagacagaatgattctcagaaactcctttgtgatgtgtgcgttcaactcacagagtttaacctttcttttcatagagcagttaggaaacactctgtttgtaaagtctgcaagtggatattcagtcctccttgaggccttcgttggaaacgggtttttttcatataagtctagacagaagaattctcagtaatttccttgtgttgtgtgtattcaactgacagagttgaactttcatttagagagagcagatttgaaacactgtttttgtggtatttgcaagtggagatttcaagcgctttggggccaaaggcagaaaaggaaatatcttcgtataaaaactagacagaatcattctcagaaactgctctgcgatgtgtgcgttcaactctcagagtttaacttttcttttcattcagcagtttggaaacactctgtttgtaaagtctgcacgtgcataatttgaccacttagaggccttcgttggaaacgggtttttttcatgtaaggctagacagaagaattctcagtaacttccttgtgttgtgtgtattcaactcacagagttgaacgatcctttacacagagcagacttgaaacactctttttgtggaatttgcaggtggagatttcagccgctttgaggtcaatggtagaataggaaatatcttcctatagaaactagacagaatgattctcagaaactcctttgtgatgtgtgcgttcaactcacagagtttaaccttccaattcatagagcagttaggaaacactctgtttgtaaagtctgcaagtggatattcagacctctttgaggccttctttggaaacgggatttcttcattttctgctagacagaagaattctcagtaacttctttgtgttgtgtgtattcaactcacagagttgaacgatcctttacacagagcagacttgaaacactctttttgtggaatttcaagtggagatttcagccgctttgaggtcaatggtagaataggaaatatcttcctatagaaactagacagaatgattctcagaaaatcttttgtgatgtgtgctttcaactcacagagtttaacttttcttctcatagagcagttaggaaacactctgtttgtaaagtctgcaagtggatattcagacctgtttgaggccttcgttggaaacgggatttcttcatattatgctagacagaagaattctcagtaacttccttgtgttgtgtgtattcagctgacagagttgaactttcatttagagagagcagatttgaaacactgtttttgtggaatttgcaattggagatttcaagcgctttggggccaaaggcagaaaaggaaatatcttcgtataaaaactagacagaatcattctcagaaactgctgcgtgatgtgtgcgttcaactctcagagtttaacttttcttttcattcagcggtttggagacactctgtttgtaaagtctgcaagtggatattttgaccacttagaggccttcgttggaaacgggtttttttcatgtaaggctagacagaagagttctcagtaacttccttgtgttgtgtgtattcaactcacacagttgaacgatcctttacagagagcggacttgtaacactctttttgtggaatttgcaagtggagatttcagccgctttgaagtcaaaggtagaaaagggaatatcttcctataaaaactagacagaatcattcccagaaactgcgttgcgatgtgttcgttcaactcacagagtttaacctttcttttcatagagcacttaggaaacagtctgtttgtaaattctgtaagtggatattctgacatcttgtggccttcgttggaaacgggatttcttcatattctgctagacagaagaattctcagtaacttccttgtgttgtgtgtatgcatctcacagagttgaacgatcctttacacagagcagacttgaaacactctttttgtggaatttgcaagtggagatttcagccgctttgaggtcaatggtagaaaaggaaatatcttcctataaaaactagacagaatgattctcagaaactcctttgtgatgtgtgtgttcaactcgcagagtttaacctttcttttcatagagcagttagtaaacactctgtttataaagtctgcaagtggatattcagacccctttgaggccttcgttggaaacgggatttcttcatattatgctagacagaagaattctcagaatcttccttgtgttgtgtgtattcaactcacagagttgaacgatggtttacacagagcagatttgaaacacactttttgtggaatttgcaagtggagatttcaagcgctttgaggccaaaggcagaaaaggaaatatcttcgtataaaaactagacagaatcactctcagaaactgctctgcgatgtgtgcgttcaactctcagagtttaacttttcttttcattcagcagtttggaaacactctgtttgtaaagtctgcacgtggatattttgaccaatcagaggccttcgttggaaacgggtttttttcctgtaaggctagacagaagaattctcagtaacttccttgtgttgtgtgtattcaactgacagagttgaactttcatttagagagaggagatttgaaacactgtttttgtggaatttgcaagtggagatttcaagcgctttaaggtcaatggcagaaaaggaaatatcttcgtttcaaaactagacagaatcattcccacaaactgcgttgtgatgtgttccttcaactcacagagtttaagctttctgttcatagagcagttaggaaacactctgtttgtaaagtctgtaagtggatattctgacatcttgtggccttcgttggaaacgggatttcttcatattatgctagacagaagaattctcagtaacttccttgtgttgtgtgtattcaactcacagagttgaacgatcctttacacagagcagacttgtaacactctttttgtggaatttgcaagtggagatttcaggggctttgaagtcaaaggtacaaaaggaaatatcttcctataaaaactagacagaatgattctcagaaactcctttgtgatgtgtgcgttcaactcacagagtttaacctttcttttcatagagcagttaggaaacactctgtttgtaaagtctgcaagtggatattcagacctctttgaggccttcgttggaaacgggttttttacatataacgctaaacagaagaattcccagtaacttccttgtgttgtgtgtgttcaactcacagagttgaactttcatttacacagagcagatttgaaacactctttttgtggaatttgcaagtttagatttcaagcgctttgaggccaaaggcagaaaaggaaatatcttcgtataaaaactagacagaatcattctcagaaactgctctgcgatgtgtgcgttcaactctcagagttcaacttttcttttcattcagcagtttggaaacactctgtttgtaaagtctgcacgtggataatttgactacttagaggccttcgttggaaacgggtttttttcatgtaaggctacacagaagaattcccagtaacttccttgtgttgtgtacattcaactcacagagttgaacgttcccttagacagagcagatttgaaacactctttttgtgcaattggcaaatggagatttcaagcgctttaagttcaatggcagaaaaggaaatatcttcgtttcaaaactagacagaatcattcccacaaactgcgttgtgatgtgttcgttcaactcacagagtttaacctttcttttcatagagcagttaggaaacagtctgtcaattctgtaagtggatattctgacctctagtggccttcgttggaaacgggatttcttcatattctgctagacagaagaattctcagaatcttccttgtgttgtgtgtattcaactcacagagttgaacgatcctttacacagagcagacttgaaacactctttttgtggaatttgcaagtggagatttcagccgctttgaggtcaatggtagaaaaggaaatattttcgtataaaaactagacagaatgattctcataaactcctttgtgatgtgtgcgttcaactcacagagtttaacctttcttttcatagagcagttaggaaacactctgtttgtaaagtctgcaagtcgatattcagacctctttgaggccttcgttggaaacgggatttcttcatattctgctagacagaagaattctcagtaacttccttgtgttgtgtgtattcaactgacagagttgaactttcatttagagagagcagatttgaaacactgtttttgtggaatttgcaagtggagatttcatgcgctttcgggccaaaggcagaaaaggaaatatcttcgtataaaaactagacagaatcattctcagaaactgctctgcgatgtgtgcgttcaactctcagagtttaacttttcttttcattcagcagtttggaaacactctgtttgtaaagtctgcacgtggatattttgaccacttagaggccttcgttggaaacggtttttttcatgtaaggctagacagaagaattcccagtaacttccttgtgttgtgtgcattcaactcacagagttgaacgttcccttagacagagcagatttgaaacactctatttgtgcaatttgcaagtgtagatttcaagcgctttaaggtcaacggcagaaaaggaaataccttcgtttcaaaagtagacagaatcattcccacaaactgcgttgtgatgtgttcgttcaactcacagagtttaacctttcttttcatagagcagttaggaaacagtctgtttgtaaattctgtaagtggatattctgacatcttgtggccttcgttggaaacgggattttatcatattctgctagacagaagattctcagtaacttccttgtgttgtgtgtattcaactcacagagttgaacgatcctttacacagagcggacttgaaacaaactttttgtggaatttgcaagtggagatttcagccgcgttgaggtcaatggtagaaaaggaaatatcttcgtataaaaactagacagaatgattctcagaaactcctttgtgatgtgtgcgttcaactcacagagtttaacctttcttttcatagagcagttaggaaacactctgcttgtaaagtctgcaagtggatattcagccctctttgaggccatcgttggaaacgggtttttttcatataaggctagacagaagaattctcagtaacttccttgtgttgtgtgtattcaagtgacagagttgaactttcatttagagagagcagatttgaaacactgtttttgtggaatttgcaagtggagatttcaagcgctttggggccaaaggcagaaaaggaaatatcttcgtataaaaactagacagaatcattctcagaaactgctctgcgatgtgtgcgttcaactctcagagtttaacttttcattcagcagtttggaaacactctgtttgtaaagtctgcgcgtggataacttgaccatttagaggccttcgttggaaacgggtttttttcatgtaaggctagacagaagaattcccagtaacttccttgtgttgtgtgcattcaactcacagagttgaacgttcccttggacagagcagatttgaaacactctatttgtgcaatttgcaagtgtagatttcaagcgctttatggtcaatggcagaaaaggaaatatcttcgtttcaaaactagacagaatcattcccacaaactgcgttgtgatgtgttcgttcaactcacagagtttaacctttctgttcatagagcagttaggaaacgctctgtttgtaaagtctgtaagtggatattctgacatcttgtggccttcgttggaaacgggatttcttcatattctgctagacagaagaattctcagtaacttccttgtgttgtgtgtattcaactcacagagttgaacgatgctttacacagagcatacttgaaacactcttcttgtggaatttgcaagtggagatttcagccgctttgaggtcaatggtagaataggaaatatcttcctatagaaactagacagaatgattctcagaaacttctttgtgatgtgtgcgttcaactcacagagtttaacctttcttttcatagagcagttaggaaacactctgtttgtaaactctgcaagtggatattcagacctctttgaggccttcgttggaaacgggatttcttcatactatgctacacagaagaattcccagtaacttccttgtgttgtgtgtgttcaactcgcagagttgaactttcatttacacagagcagatttgaaacactctttttgtggaatttgcaaatggagatttcaagcgctttgaggccaaaggcagaaaaggaaatatcttcgtataaaaaccagacagaatcattctcagaaactactgcgtgatgtgtgcgttcaactctcagagtttaacttttcttttcattcagcggtttggaaacactttgtttgtaaagtctgcacgtggatattttgaccacctagaggccttcgttggaaacgggtttttttcatgtaaggctagacagaagaattcccagtaacttccttgtgttgtgtacattcaactcacagagttcaacgttcccttagacagagcagatttgaaacactctttttgtgcaattggcaagtggagatttcaagcgctttaaggtcaatggcagaaaaggaaatatcttcgtttcaaaactagacagaatcattcccacaaactgcgttgtgatgtgttcgttcaactcacagagtttaacctttcttttcatagagcagttaggaaacactctgttggtaaattctgtaagtggatattctgacatcttgtggccttcgttggaaacaggatttcttcatattctgctacacagaagaattctcagaaacttccttgtgttgtgtgtattcaactctcagagttgaacgaccctttacacagagcagacttgaaacactctttttgtggaatttgcaagtggagatttcagccgctttgaggtcaatggtagaaaaggaaatatcttcgtataaaaactagacagaatgattctcagaaactcctttgtgatgtgtgtgttcaactctgagagtttaacctttcttttcatagagcagttaggaaacactctgtttatagagtctgcaagtggatattcagacccctttgtggtcttctttggaaacggatttcttcatattatgctagacagaagaattctcagtaacttccttgtgttgtgtgtattcaactgacagagttgaactttcatttagagggagcagattagaaacactgtttttgtggaatttgcaagtgcagatttcaagcgctttgtggccaaaggcagaaaaggaaatatcttcgtatgaaaactagacagaatcattctcagaaactgctctgtgatgtgtgcgttcaactctcagagtttaacttttcttttcattcagcagtttggaaacactctgtttgtaaagtctgcacgtggataatttgaccacttagaggccttcgttggaaacgggtttttttcatgtaaggctagacagaagaattcccagtaacttccttgtgttgtgtgcattcaactcagagagttgaactttcctttagacagagcagatttgaaacactctatttgtgcaatttgcaagtgtagatttcaagcgctttaaggtcaatggcagaaaaggaaatatcttcgtttcaaaactagacagaatcattcccacaaactgcgttgtgatgtgttcgttcaactcacagagtttaacttttctgttcatagagcagttaggaaacactctgtttgtaaagtctacaagtggatattcagacctccttgaggccttcgttggaaacgggatttcttcatattctgctagaccgaagaattctcagaatcttccttgtgttgtgtgtattcaactcacacagttgaacgatggtttacacagagcagatttgaaacactctttttgtggaatttgcaagtggagatttcagccgcgttgaggtcaatggtagaaaaggaaatatcttcgtataaaaactagacagcatgattctcagaaactcctttgtgatgtgtgcgttcaattcacagagtttaacttttcttttcatagagcagttaggaaacactctgtttgtaaagtctgaaagtggatattcagacctctttgtggccttcgttggaaacgggatttcttcatattctgctagacagaagaattctcagtaacttccttgtgttgtgtgtattcaactcacagagttgaacgatcctttacacagagcagacttgaaacactctttttgtggaatttgcaagtggagatttcaagcgcttcggggccaaaggcagaaaaggaaatatcttcgtataaaaactagacagaatcattctcagaaactgctgcgtgatgtgtgcgttcaactctcagagtttaacttttcttttcattcagcggtttggaaacactctgtttgtaaagtctgcacgtggaaattttgaccacttagaggccttcgttggaaacgggattttttcatgtaaggctagacagaataattcccggtaacttccttgtgttgtgtacattcaacttacagagttgaacgttcccttggacagagcagatttgaaacactctttttgtgcaattggcaagtggagatttcaagcgcttaaggtcaatggcagaaaaggaaatatcttcgtttcaaaactagacagaatcattcccacaaactgcgttgtgatgtgttcgttcaactcacagagtttaacctttctgttcatagagcagttaggaaacactctgtttgtaaagtctgtaagtggatattctgatatcttgtggccttcgttggaaacgggatttcttcatattctgctagacagaagaattctcagaaacttccttgtgttgtgtgtattcaactcacagagttgaacgatcgtttacacagagcagacttgagaccctctttttgtggaatttgtaagtggagatttcagccgctttgaggtcaatggtagaaaaggaaatatcttcatataaaaactagacagaatgattctcagaaactcctttgtgatgtgtgtgttcaactcacagagtttaacctttcctttcatagagcagttagtaaacactctgtttataaagtctgcaagtggatattcagacccctttgaggccttcgttggaaacgggatttcttcatattatgctagacagaagaattcccagtaacttctttgtgttgtgtgtgttcaactcacagagttgaactttgatttacacagagcagatttgaaacactctttttgtggaatttgcaagtggagatttcaagcgctttgaggccaaaggcagaaaaggaaatatcttcgtataaaaactagacagaatcattctcagcaatctgctgcgtgatgtgtgcgttcaactctcagagtttaacttttcttttcattcagcggtttggaaacactctgtttgtaaagtctgcacgtggatattttgaccacttagaggccttcgttggaaacgggtttttttcatgtaaggctagacagaagaattcccagtaacttccttgtgttgtgtacattcaactcacagagttgaacgttcccttagacagagcagatttgaaacactctttttgtgcaattggcaagtggagatttcaagcgctttaaggtcaatggcagaaaaggaaatatcttcgtttcaaaactagacagaatcattcccacaaactgcgttgtgatgtgttcgttcatctcacagagtttaacctttcttttcatagagcagttaggaaacagtctgtttgtaaattctttaagtggatattctgacatcttgtggccttcgttggaaacgggatttcttcatattctgctagacagaaggattctcagtaacttccttgtgttgtgtgtattcaactcacagagttgaacgatcctttacacagagcagacttgaaacactctttttgtgaaatttgcaagtggagatttcagccgctttgaggtcaatagtagaaaaggaaatatcttcgtagaaaaactagacagaatgattctcagaaactcctttctgatgtgtgcattcaactcacagagtttcacctttcttttcatagagcagttaggaaacactctgtttgtaaagtctgcaagtggatattcagacctccttgaggccttcgttggaaacgggatttcttcatattctactagacagaatcattctcagaaactgctgcgtgatgtgtgcgttcaactctcagagtttaacttttcttttcattcagcggtttggaaacactctgtttctaaagtctgcacgtggaaattttgaccacttagaggccttcgttggaaacgggtttttttcatgtaaggctagacagaagaattcccagtaactttccttgtgttgtgtgcattcaactcacagagttgaacgttcccttagaccgagcagatttgaaacactctatttgtgcaatttgcaagtgtagttttcaagctctttaaggtcaacggcagaaaaggaaatatcttcgtttcaaaactagacagaatcattcccacaaactgcgttgtgatgtgttcgttcaactcacagagtttaacctttctgttcatagagcagttaggaaacactctgtttgtaaagtctgcaagtggatattcagacctcctagaggccttcgttggaaacaggatttcttcatattctgctagacagaagaattctcagtaacttccttgtgttgtgtttattcaactcacagagttgaatgatcctttacacagagcagacttgaaacactctttttgtggaatttgcaagtggagatttcagccgctttgtggtcaatggtagaaaaggaaatatcttcgtataaagactagacagaatgattctcagaaactcctttgtgatgtgtgtgttcaactcacagagtttaacctttcttttcatagagcagttaggaaacactctgtttgtaaagtctgcaagtggatattcagacctctttgaggccttcgttggaaactggtttttttcatgtaaggctagacagaagatttcccagtaacttccttgtgttgtgtgtgttcaactcacagagttgaactttcatttacacagagcagatttgaaacactctttttgtggaatttgcaaatggagatttcaagcgctttgaggccaaaggcagaaaaggaaatatcttcgtatgaaaactagacagaatcattctcagaaactgctctgcgatgtgtgcgttcaactctcagagtttaacttttcttttcattcagcagtttggaaacactctgtttgtaaagtctgcacgtggatatgttgaccacttagaggccttcgttggaaacgggtttctttcctgtaaggctagatagaagaattcccagtaacttccttgtgttgtgtacattcaactcacagagttgaacgttcccttagacagagcagatttgaaacactctttttgtgcaattggcaagtggagatttcaagcgctttaaggtcaatggcagaaaaggaaatatcttcgtttcaaaactagacagaatcattcccacaaactgcgttgtgatgtgttcgttcaactcacagagtttaaccattctgttcatagagcagttaggaaacactctgtttgtaaagtctgtaagtggatattctgacatcttgtggccttcgttggaaaagggatttattcatattctgctagacagaagaattctcagtaacttccttgtgttgtgtttattcaactcacagagttgaatgatcctttacacagagcagacttgaaacactgtttttgtggaatttgcaagtggagatttcagccgctttgaagtcaatggtagaaaagtaaatatcttcgtataaaaactagacagaatgattctcagaaactcctttgtgatgtgtgcgttcaactcacagagtttaacctttcttttcatagagcagttaggaaacactctgtttgtaaagtctgcaagtggatattcagacatctttgaggctttcgttggaaacgggatttcttcgtattctgctatacagaagaattctcagtaacttccttgtgttgtgtgtattcaactgacagagttgaactttcatttaggtagagcagatttgaaacactgtttttgtggaatttgcaagtggagatttcaagcgctttggggccaaaggcagaaaaggaaatatcttcgtataaaaactagacagaatcattctcagaaactgctgcgtgatgtgtgcgttcaactctcagagtttaacttttcttttcattcagcggtttggaaacactctgtttgtaaagtctgcacgtggaaattttgaccacttagaggccttcgttggaaacgggattttttcatgtaaggctagacagaagaattcccagtaacttccttgtgttgtgtgcattcaactcacagagttgaacgttcccttagacagagcagatttgaaacactctatttctgcaatttgcaagtgtagttttcaagctctttaaggtcaacggcagaaaaggaaatatcttcgtttcaaaactagacagaatgattctcagaaactcctttgtgatgtgtgcgttcaactcacagagtttaacctttcttttcatagagcagttaggaaacactctgtttgtaaagcctgcaagtggatattcagacatccttgaggctttcgttggaaacgggatttcttcatattctgctagaaagaagaattctgagtaacttccttgtgttgtgtgtattcaactcacagagttgaacgatcctttacacagagcagacttgtaacactctttttgtggaatttgcaagtggagatttcagccactttgaagtcaaaggtagaaaaggaaataagttcctataaaaactagacagaatgattctcagaaaatcctttgtgatgtgtgcgttcaactcacagagtttaacttttgttttcatagagcagttaggaaacactctgtttgtaaagtctgcaagtggatattcagacctctttgaggccttcattggaaacgggatttcttcatattatgctagacagaagaattcccagtaacttccttgtgttgtgtgttttttaagtcacagagttgaactttcatttacacagagcagatttgaaacactctttttgtggaatttgcaagtggagatttcaagtgctttgaggccaatggcagaaaaggaaatatcttcgtataaaaactagacagaatcattctcagaaactgctctgcgatgtgtgcgttcaactctcagagtttaacttttcttttcattcaacagtttgaaaacactctgtttgtaaagtctgcacgtggatattttgaccacttagaggccttcgttggaaacgggtttttttcctgtaaggctagacagaagaattctcagtaacttccttctgttgtgtgtattcaactcacagagttcaacgatcctttacacagagcagacttgaaacactctttttgtggaatttgcaagtggacatttcagccgctttgaggtcaatggtagaaaaggatatatcttcgtataaaaactagacagaattattctcagaaactcctttgtgatgtgtgcgttcaactcacagagtttaacctttcttttcgtagagcagttaggaaacactctgtttgtaaagtcggcaagtggatattcagacctctttggggccatcgttggaaatgggatttcttcatattctgctagacagaagaattctcagtaacttccttgtgttgtgtgtattcaactgacagagttgaacgatcctttacacagagcagacttgaaacacactttttgtggattttgcaagtggagatttcagcctctttgagatcaatggtagaataggaaatatcttcctatagaaactagacagaatgattctcagaaactcctttgtgatgtgtgcgttcaagtcacagagtttaacctttcttttcatagagcagttaggaaacactctgtttgtaaagtctgcaagtggatattcagacctctttgaggccttcgttggaaacgggtttttttcatataaggctagacagaagaattctcagtaacttccttgtgttgtgtgtattcaactgacagagttgaactttcatttagagagagcagatttgaaacactgtttttgtggaatttgcaagtggagatttcaagccctttggggccaaaggcagaaaaggaaatatcttcgtgtaaaaattagacagaatcattctcagaaactgctgcgtgatgtgtgcgttcaactctcagagtttaacttttcttttcattcagcggtttggaaacactctgtttgtaaagtctgcacgtggatattttgaccacttagaggccttcgttggaaacgggtttttctcatgtaaggctagacagaagaattcccagtaacttccttgtgttgtgtacattcaactcacagagttgaacgttcccttagacagaggagatttgaaacactctttttgtgcaattggcaagtggagatttcaagcgctttaaggtcaatggcagaaaaggaaatatcttcgtttcaaaactagacagaatgattctcagaaactactttgtgatgtgtgcgttcaactcacagagtttaacctttcttttcctagagtagttaggaaacactctgtttgtaaagtctgcaagtggatattcagacctctttgtggccttcattggaaacgggatttcttcatattatgctagacagaagaattctcagtaacttccttgtgttgtgtgcattcatatcacagagttgaacgatcctttacgcagagcagattagaaacactctttttgtggaacttgcaattggagatttcagccgctttgaggtcaatggtagaaaaggaaatatctttgtataaaaactagacagaatgattctcagaaactcctttgtgatgtgtgcgttcaactcacagagtttaacctttcttttcatagagcagttaggaaacactctgtttgtaaagtctgcaagtggatattcagacctctttgaggccttcgttggaaacgggtttttttcatataagcctagacagaagaattcccagtaacttccttgtgttgtgtgtgttcaactcacagagttgaactttcatttacacagagcagatttgaaacactctttttgtggaatttgcaggtggagatttcaagcgctttgaggccaaaggcagaaaacgaaatatcttcgtataaaaactagacagaatcattctcagaaagtgctctgcgatgtgtgtgttcaactctcagagtttaacttttcttttcattcagcagtttggaagcactctgtttgtaaagtctgcacgtggataatttgaccacttagaggccttcgttggaaacgggtttttttcctgtaaggctagacagaagaattcccagtaacttccttgtgttgtgtacattcaactcacagagttgaacgttcccttagacagagcagatttgaaacactctttttgtgcaattggcaagtggagatttcaagcgctttgaggtcaatggcagaaaaggaaatatcttcgtttcaaaagtagacagaatcattcccacaaactgcgttgtgatgtgttcgttcaactcacagagtttaacctttctgttcatagagcagttaggaaacactctgtttgtaaactctgtaagtggatattctgacatcttgtggccttcgttggaaacgggatttcttcacattctgctagacagaagaattctcagtaacttccttgtgttgtgtgtattcaactcacagagttgaacgatcctttacacagagcagacttgtaacactctttttgtggaatttgcaagtggagatttcagccgctttgacgtcaaaggtagaaaaggaaatatcttcctataaaaactaggcagaatgattctcagaaaatcttttgtgatgtgtgcgttcaactcacagagtttaacttttgttctcatagagcagttaggaaacactctgtttgtaaagtgtgcaagtggatattcagacctctttgaggccttcgttggaaacgggatttcttcatattctgctagacagaagaattcccagtaacttccttgtgttgtgtgtgttcaactcacagagttgaacgatcctttacacagagcagacttgtaacactctttttgtggaatttgcaaatggagatttcaagcgctttgaggccaaaggcagaaaaggaaatatcttcgtataaaaactagacagaatcattctcagaaactgctctgcgatgtgtgcgttcaactctcagtgtttaacttttcttttcattcagcagtttggaaacactctgtttgtaaagtctgcacgtggataacttgaccacttagaggccttcgttggaaacgggtttttttcatgtaaggctagacagaagaattctcagtaacttccttgtgttgtgtgtattcaactgacagagttgaacgatcctttacacagagcagacttgtaacactctttttgtggaatttgcaagtggagatttcagccgctttgaagtcaaaggtagaaaaggaaatatcttcctataaacactagacagaatcattcccacaaactgcgttgtgatgtgttcgttcatctcacagagtttaacctttcttttcatagagcagttaggaaacagtctgtttgaaaattctgtaaggggatattctgacatcttgtggccttcgttggaaacgggatttcttcatattctgctagacagaagaattctcagtaacttccttgtcttgtgtgtattcaactcacagagttgaacgatcctttacacagagcagacttgaaacactctttttgtggaatttgcaagtggagatttcagccgctttgaggtcaatggtagaaaaggaaatatcttcgtataaaaactagacagaatgattctcagaaactcctttgtgatgtgtgtgttcaactcacagagtttaacctttcttttcatagagcagttagtaaacactctgtttataaattctgcaagtggatattcagacccctttgaggccttcgttggaaacgggatttcttcatattatgctagacagaagagttcccagtaacttccttgtgttgtgtgtgttcaactcacagagttgaactttcatttacacagagcagatttgaaacactctttttgtggaatttgcaagtggagatttcaagcgctttgaggacaaaggcagaaaaggaaatatcttcgtataaaaactagacagaatcattctcagaaactgctctgtgatgtgtgcgttcaactctcagagtttaacttttcttttcattcagcagtttggaaacactctgtttctaaagtctgcacgtggataatttgaccacttagaggccttcgttggaaacgggtttttttcatgtaaggctagacagaagaattcccagtaacttccttgtgttgtgtacattcaactcacagagttgaacgttcccttagacagaacacatttgaaacactctttttgtgcaattggcaagtggtgatttcagccgctttgaggtcaatggtagaaaacgaaatatcttcgtataaaaactagacagaatcattcccacaaactgcgttgtgatgtgttcgttcaactcacagagtttaacctttctgttcatagagcagttaggaaacactctgtttgtaaagtctgtaagtggatattctgacatcttgtggtcttcgttggaaacgggatttcttcatattctgctagacagaagaattctcagtcacttccttgtgttgtgtgtattcaactcacagagttgaacgatcctttacacagagcagacttgaaacactctttttgtggaatttgcaagtggagatttcagccgctttgaggtcaattgtagaataggatatatcttcgtatagaaactagacagaatgattctcagaaactccttagtgatgtgtgcgttcaactcacagagtttaacctttctgttcatagagcagttaggaaacactctgtttgtaaagtctgcaagtggatattcagacctccttgaggccttcgttggaaacgggatttcttcatattctgctagacagaagaattcccagtaacttccttgtgttgtgtgtgttcaactcacagagttgaactttcatttacacagagcagatttgaaacactctttttgtggaatttgcaaatggagatttcaagcggtttgaggccaaaggcagaaaaggaaatatcttcgtataaaaactagacagaatcattctcagaaactgctgcgtgatgtgtgcgttcaactctcagagtttaacttttcttttcattcagcggtttggaaacactctgtttgtaaagtctgcacgaggaaattttgaccacttagaggccttcgttggaaacgggtttttttcatctaaggctagacagaagaattcccagtaacttccttgtgttgtgtgcattcaactcacagagttgaacgttaccttagacagagcagatttgaaacactctatttgtgcaatttgcaagtgtagatttcaagcgctttaaggtcaacggcagaaaaggaaatatcttcgtttcaaaactagacagaatcattcccacaaactgcgttgtgatgtgttcgttcaactcacagagtttaacctttctgttcatagagcagttaggaaacactctgtttgtaaagtctgtaagtggatattctgacatcttgtggccttcgttggaaacgggatttcttcatattctgctagacagaagaattctcagaaacttccttgtgttgtgtgttttcaactcacagagttgaacgatcctttacacagagcagacttgaaacactccttttgtggaatttgcaagtggagatttcatccgctttgaggtcaatggtagaataggaaatatcttcctatagaaagtagacagaatgattctcagaaactcctttgtgatgtgtgcgtacaactcacagagtttaacctttcttttcatagagcagttaggaaacactctgtttgtaaagtctgcaagtggatattcagacctctttgaggccttcgttggaaacgggtttttttcatataaggctagacagaagaattcccagtaacttccttgtgttgtgtgtgttcaactcacagagttgaactttcatttacacagagccgatttgaaacactctttttgtggaatttgcaagtggagatttcagccgctttgaggtcaatggtagaaaaggaaatatcttcgtataaaaactagacagaatgattctcagaaagtcctttgtgatgtgtttgttcaactcacagagtttaacctttcttttcatagagcagttaggaaacactctgtttgtaaagtctgcaagtggatattcagacctctttgaggccttcgttggaaacgggatttcttcatattctgctagacagaagaattctcagtaacttccttgtgttgtgtgtattcaactcacagagttgaacgatcctttacacagagcagacttgaaacactctttttgtggaatttgcaactgtagatttcaagcgctttaaggtcaatggcagaaaaggaaatatcttcgtttcaaaactagacagaatcattcccacagactgcgttgtgatgtgttcgttcaaatcacagagtttaacctttcttttcatagagcagttaggaaacagtctgtttgtaaattctgtaagtggatattctgacaacttgtggccttcgttggaaacgggatttcttcatattctgctagacagaataattctcagtaacttccttgtgttgtgtgtattcaactcacagagttgaacgatcctttacacagagcagaattgaaacactctttttgtggaatttgcaagtcgagatttcagccgctttgaggtcaatagtagaaaaggaaatatcttcgtagaaaaactagacagaatgattctcagaaactcctttgtgatgtgtgcgttcaactcacagagtttaacctttcttttcatagagcagttatgaaacactctgtttgtaaagtctgcaagttgatattcagacctccttgaggccttcgttggaaacgggatttcttcatattatgctagacagaagaattcccagtaacttccttgtgttgtgtgtgttcaactcacagagttgaactttcatttacacagagcagatttgaaacactctttttctggaatttgcaaatggagatttcaagcgctttgaggccaaaggcagaaaaggaaatatcttcgtataaaaactagacagaatcattctcagaaactgctctgcgatgtgtgcgttcaactctcagagtttaacttttcttttcattcagcagtttggaaacactctgtttgtaaagtctgcacgtggatattttgaccacttagaggccttcgttggaaacgggctttttcctgtaaggctagacagaaagaattcccagtaacttccttgtgttgtgtacattcaactcacagagttgaacgttcccttagacagagcagatttgaaacactctttttgtgcaattggcaaatggagatttcaagcgctttaaggtcaatggcagaaaaggaaatatcttcgtttcaaaactagacagatgattctcagaaactcctttgtgatgtgtgcgttcaactcacacagtttaacctttctttccatagagcagttaggaaacactctgtttgtaaagtctgcaagtggatattcagacctcctacaggccttcgttggaaacgggatttcttcatattatgctagacagaagaattctcagtaacttccttgtgttctgtgtattcaactcacagagttgaacgatactttacacagagcagacttgaaacactctttttgtggaatttgcaagtggagatttcagccgctttgaggtcaattgtagaaaaagaaatatcttcgtatagaaactagacagaatgattctcagaaactcctttgtgatgtgtgcgttcaactcagagagtttaacctttcttttcatagagcagttaggaaacacgctgtttataaagtctgcaagtggatattcagacccctttgaggccttcgttggaaacgggatttcttcatattatgctagacagaagaattcccagtaacttccttgtgttgtgtgtgttcaactcacagagttgaactttcatttacacagagcagatttgaaacactctttttgtggaatttgcaagtggagatttcaagcgctttgaggccaaaggcagaaaagcaaatatcttcgtataaaaactagacagaatcattctcagaaactgctctgcgatgtgtgcgttcaactctcagagtttaacttttcttttcattcagcagtttggaaacactctgtttgtaaagtctgcacgtggataatttgaccacttagaggccttcgttggaaacgggattttttcatgtaaggctagacagaagaattcccagtaacttccttgtgttgtgtacattcaactcacagagttgaacgttccgttagacagagcagatttgaaacactctttttgtgcaattggcaagtggagatttcaagcgctttgaggtcaatggcagaaaaggaaatatcttcgtttcaaaactagacagaatcattcccacaaactgcgttgtgatgtgttcgttcaactcacagagtataacctttctgttcatagagcagttaggaaacactctgtttgtaaagtctgtaagtggatattctgacatcttgtggccttcgttggaaacgggatttcttcatattctgctagacagaagaattctcagaaacttccttgtgttctgtgttttcaactcacagagttgaacgatgctttacacagagtagacttgaaacactctttttgtggaatttgcaagtggagttttcagccgctttgaggtcaatggtagaaaaggaaatatcttcgtataaaaactagacagaatgattctcagaaactactttgtgatgtgtgcgttcaactcacagagtttaacctttcttttcatagagcagtgaggaaacactctgtttgtaaagtctgcaagtggatattcagacctccttgatgccttcgttggaaacgggatttcttcatattatgctagacagaagaattcccagtaacttcccttgtgttgtgtgtgttcaactcacagagttgaactttcatttacacagagcagatttgaaacactctttttgtggaatttgcaagtggagatttcaagcgctttgaggccaaaggcagaaaaggaaatatcttcgtataaaaactagacagaatcattctcagaaactgctctgcgatgtgtgcgttcaactctcagagtttaacttttcttttcattcagcagtttggaaacactctgtttgtgaagtctgcacgtcgatattttgaccacttagaggccttcgttggaaacgggtttttttcctgtaaggctagagagaagaattcccaggaacttccttgtgttgtgtacattcaactcacagagttgaacgttcccttagacagagcagatttgaaacactctttttgtgcaattggcaagtggtgatttcagccgctttgaggtcaatggtagaaaaggaaatatcttcgtataaaaactagacagaatgattctcagaaacttcattgtgacgtgtgcgttcaactcacagagtttaacctttcttttcatagagcagttaggaaacactctgtttgtaaagtctgcaagtggatattcagacctctttgaggccttcgttggaaacgggatttcttcataatgtgctagacagaagaattctcagtaacttccttgtgttgtgtgtattcaactcacagagttgaacgatcctttacacagagcagacttgaaacactctttttgtggaatttgcaagtggagatttcatccgctttgaggtcaatggtagaataggaaatatcttcctatagaaactagacagaatgattctcataaactcctttgtgatgtgtgcgttcaactcacagagtttaacctttcttttcatagagcagttaggaaacactctgtttgtaaagtctgcaagtggatattcagacctccttgaggccttcgtttgaaacgggatttcttcatattctgctagacagaagaattcccagtaacttccttgtgttgtgtgtgttcaactcacagagttgaactttcatttacacagagcagatttgaaacactctttttgtgcaatttgcaagtggagatttcaagcgctttgagaccaaaggcagaaaaggaaatatcttcgtttcaaaactagacagaatcattctcagaaactgctctgcgatgtgtgcgttcaactctcagagtttaacttttcttttcattcagcagtttggaaacactctgtttgtaaagtctgcacgtggatatgttgaccacttagaggccttcgttggaaacgggtttttttcatgtaaggctagacagaagaattcccagtaacttccttgtgttgtgtgcattcaactcacagagttgaactttcccttagacagagcagatttgaaacactctatttgtgcaatttgcaagtgtagatttcaagcgctttaaggtcaacggcagaaaaggaaatatcttcgtttcaaaactagacagaatcattcccacaaactgcgttgtgatgtgttcgttcaactcacagagtttaacctttcttttcatagagcagttaggaaacagtctgtttgtcaattctgtaagtggatattctgacatcttgtggccttcgttggaaacgggatttcttcatattctgctagacacaagaattttcagtaacttccttgtgttgtgtgtattctactcacagagttgaacgatcctttacacagagcagacttgaaacactctttttgtggaatttgcaagtggagatttcagccgctttgaggtcaatggtagaaaaggaaatatcttcgtataaagactagacagaatgattctcagaaactcctttgtgatgtgtgcgttcaactcacagagtttaacctttcttttcatggagctgttaggaaacactctgtttgtaaagtctgcaagtggatattcagacctctttgaggccttcgttggaaacgggatttcttcatactgtgctagacagaagaattctcagtaactttcttgtgttgtgtgtattcaactgacagagttgaactttcatttagagagagcagatttgaaacactgtttttgtggaatttgcaagtggagatttcaagcgctttggggccaaaggcagaaaaggaaatatcttcgtataagcactagacagaatcattctcagaaactgctctgcgatgtgtgcgttcaactctcagagttaaacttttcttttcattcagcagtttggaaacactctgtttgtaaagtctgcacgtggatattttgaccacttagaggccttcgttggaaacgggtttttttcctgtaaggctagacagaagaattcccagtaacttccttgtgttgtgcgcattcaactcacagagttgaacgttcccttagacagagcagatttgaaacagcctatttgtgcaatttgcaagtgtacatttcaagcgctttaaggtcaacggcagaaaaggaaatatcttcctttcaaaactagacagaatcactcccacaaactgcgttgcgatgtgttcgttcaactcacagagtttaacatttcttttcatagagcacttaggaaacagtctgtttgtaaattctgtaagtggatattctgacatcttgtggccttcgttggaaacgggatttcttcatattctgctagacagaagaattctcagtaacttccttgtgttgtgagtattcaactcacagagttgaacgatcctttacacagagcagacttgaaacactctttttgtggaatttgcaagaggagatttcagccgctttgaggtcaatagtagaaaaggaaatatcttcgtagaaaaactagacagaatgattctcagaaactcctttgtgatgtgtgcgttcaactcacagagtttaacctttcttttcatagagcagttaggaaacactctgtttgtaaagtctgcaagtggatattcagacctctttgaggccttcgttttaaacgggatttcttcatattatgctagacagaggaattcccagtaacttccttgtgttgtgtgtgttcaactcacagagttgaactttcatttacacagagcagatttgaaacactctttttgtggaatttgcaagtggagatttcaagcgctttgaggccaaaggcagaaaaggaaatatcttcgtttcaaaactaggcagaatcattctcagaaactgctctgcgatgtgtgtgttcaactctcagagtttaacttttcttttcattcagcagtttggaaacactctgtttgtaaagtctgcacgtggataatttgaccacttagaggccttcgttggaaacgggtttttttcagtaaggctagatagaagaattcccagtaacttccttgtgttgtgtgcattcaactcacagagttgaacgttcccttagacagagcagatttgaaacactctatttgtgcaatttgcaagtgtagatttcaaccgctttaaggtcaacggcagaaaaggaaatatcttcgtttcaaaactagacagaaatcattcccacaaactgcgttgtgatgtgttcgttcaactcacagagtttaacctttcttttcatagagcagttaggaaacagtctgtttgtcaattctgtaagtggatattctgacatcttgtggcattcgttggaaacgggatttcttcatattctgctagacagaagaactctcagaaacctcctggtgttgcgtgttttcaactcacagagttcaacgatccgttacacagagtagacttgaaaaactctttttgttgaattggccagtggagatttcagccgctttgaggtcaatggtagaaaaggaaatatcttcgtataaaaactagacagaacgattctcagaaactcctttgtgatgtgtgtgttcaactcacagagtttaacctttcttttcatagagcagttaggaaacactctgtttgtaaagtctgcaagtggatattcagacctctttgaggccttcgttggaaacgggatttctccatattctgctagacagaagaattctcagtaacttccttgtgttgtgtgtattcaactgacagagttgaactttcatttagagagagcagatttgtaagactgtttttgtggaatttgcaagtggagatttcaagcgctttgcggccaaaggcagaaaaggaaatatcttcgtataaaaactagacagaatcattctcagaaactgctctgtgatgtgtgcgttcaactctcagagtttaacttttcttttcattcagcagtttcgaaacactctgtttgtaaagtctgcacgtggatattttgaccacttagaggccttcgttggaaacgggttttcttcatgtaaggctagacagaagaattcccagtaacttccttgtgttgtgtgcattcaactcacacagatgaacgttcccttagacagagcagatttgaaacactctatttgtgcaatttgcaagtgtagatttcaagcgctttaaggtcaatggcagaaaaggaaatatcttcgtttcaaaactagacagaatgattctcagaaactcctttgtgatgtgtgcgttcaagtcacagagtttaacctttcttttcatagagcagttaggaaacactctgtttgtaaagtctgcaagtggatattcagacctccttgaggccttcgttggaaacgggatttcttcctattatgctagacagaagaattctcagtaacttccttgtgttgtgtgtattcaactcacagagttgaaccatcctttacacagagcagacttgaaacactctttttgtggaatttgcaagtggagatttcagccgctttgaggtcaatggtagaaaaggaaatatcttcgtataaaaactagacagaaatgattctcagcaaactcctttgtgaggtgtgtgttcaactcacagagtttaacctttcttttcatagagcagttagtaaacactctgtttataaagtctgcaagtggatattcagacccctttgaggccttcgttggaaacgggatttcttcatattctgctagacagaagaattctcagtaacttccttgtgttgtgtgtattcaactgacagagttgaactttcatttagagagagcagatttgaaacactgtttttgtggaatttgcaagtggagatttcaagcgctttggggccaaaggcagaaaaggaaatatcttcgtataaaaactagtcagaatcattctcagaaactgctgcgtgatgtgtgcgttcaactctcagagtttaacttttcttttcattcagcggtttggaaacactctgtttgtaaagtctggacgtggaaattttgaccacttagaggccttcgttggaaacgggtttttttcatgtaaggctagacagaagaattcccagtaacttccttgtgttgtgtgcattcaactcacagagttgaacgttcccttagacagagcagatttgaaacactctatttgtgcaatttgcaagtgtagttttcaagctcttttaggtcaacggcagaaaaggaaatatcttggtttcaaaactagacagaatcattctcagaaactgctctgcgatgtgtgcgttcaactctcagagtttaacttttcttttcattcagcagtttggaaacactctgtttgtgaagtctgcacgtggataatttgaccacttagaggcctacgttggaaacgggtttttttcatgtaaggctagacagaagaattctcagaaacttccttgtgttgtgtgttttcaactcacagagttaaacgatccattacacagagtagacttgaaacactctttttgtggaattggcaagtggagatttcagccgctttgaggtcaatggtagaataggaaatatcttcctatggaaactagacagaatgattctcagaaactcctttgtgatgtgggcgttcaactcacagagttcaacctttcttttcatagagcagttgggaaacactctgtttgtaaagtctgcaagtggatattcagacttctttgaggccttcgttggaagcgggatttcttcatattctgctagacagaagaattcccagtaacttccttgtgttgtgtgtgttcaactcacagagttgaactttcatttacacagagcagatttgaaacactctttttgtggaatttgcaagtggagatgtcaagcgctttgaggccaaaggcagaaaaggaaataccttcgtttcaaaactagacagaatcattctcagaaactgctctgcgatgtgtgcgttcaactctcagagtttaacttttcttttcattcagcagtttggaaacactctctttgtaaagtctgcacttggatattttgaccacttagaggccttcgttggaaacgggtttttttcctgtaaggctagacagaagaattcccagtaacttccttgtgttgtgtacattcaactcacagagttgaacgttcccttagacagagcagatttgaaacactctttttgtgcagttggcaaatggagatttcaagcgctttaaggtcaatggcagaaaaggaaatatcttcgtttcaaaactagacagaatcattcccacaaactgcgttgtgatgtgttcgttcaactcacagagtttaacaattcttttcatagagcagttaggaaacactctgtttgtaaattctgtaagtggatattctgacatcttttggccttcgttggaaacgggatttcttcatattctgctagacagaagaattctcagtaacttccttgtgttgtgtgtattcaactcacagagttgaacgatcctttacacagagcggacttgaaacactcgttttgtggaatttgcaagtggaggtttctgccgcgttgaggtcaatggtagaaaaggaaatatcttcgtataaaaactagacagaatgattctcagaaactcctttgtgatgtgtgagttcaactcacagagtttaacctttcttttcatagagcagttaggaaacactctgtttgtaaagtctgcaagaggatattcagacctctttgaggccttcgttggaaacgggttttattcatataaggctagacagaagaattctcagtaacttccttgtgttgtgtgtattcaactcacagagttgaacgatcctttacacagagcagacttgaaacactctttttgtggaaattgcaagtggagatttcagccgctttgaggtcaatgatagaaaaggaaatatcttcgtataaaaactagacagaatcattctcagaaactgctgcgtgatgtgtgggttcaactctcagagtttaacttttcttttcattcagcggtttggaaacactctgtttgtaaagtctgcacgtggaaattttgaccacttagaggccttcgttggaaacgggtttttttcatgtaaggctagacagaagaattcccagtaacttccttgtgttgtgtgcattcaactcacagagttgaacgttcccttagacagagcagatttgaaacactctatttgtgcaatttgcaagtgtagatttcaagcgcattaaggtcaatggcagaaaaggaaatatcttcgtttcaaaattagacagaatcactcccacaaactgcgttgtgatgtgttcgttcaactcacagagtttaacctttcttttcttagagcagttaggaaacagtctgtttgaaaattctgtaagtggatattctgacatcttgtggccttcgttggaaacgggatttcttcatattctgctagacagaataattctcagtaacttccttgtgttgtgtgtattcaactcacagagttgaacgatcctttacagagagcagacttgaaacactctttttgtggaatttgcaagtggagaattcagccgctttgaggtcaatggtagaaaaggaaatatcttcgtataaagactagacagaatgattctcagaaactcctttgtgatgtgtgcgttaaactcacagagtttaacttttcttttcatagagcagttaggaaacactctgtttgtaaagtctgcaagtggatattcagacctctttgacgccttcgttggaaacgggatttcttcatattctgctagacagaagaattctaagtaacttccttgtgttgtgtgtattcaactgacagagttgaactttcatttagagagagcagatttgaaacactgtttttgtggaatttgcaagtggagatttcaagcgctttggggccaaaggccgaaaagtaaatatcttcgtataaaaactagacagaatcattctcaaaaactgctgcgtgatgtttgcgttcaactctcagagtttaacttttcttttcattcagcggtttggaaacactctgtttgtaaagtttgcacgtggatattttgaccacttagaggccttcgttggaaacgggtttttttcatgtaaggctagacagaagaattcccagtaacttccttgtgttgtgtgcattcaactcacagagttgaacagttcccttagacagagcagatttgaaacactctatttgtgcaatttgcaagtgtagatttcaagcgctttaaggtcaatggcagaaaaggaaatatcttcgtttcaaaactagacagaatgattctcagaaactcctttgtgatgtgtgcgttcaactcacagagtttaacctttcttctcatagagcagttaggaaacactctgtttgtaaagtctgcaagtggatattcagacctcttttaggccttcgttggaaacgggatttcttcatattctgctagacagaagaattctcagtaacttccttgtgttgtgtattcaactcacagagttcaacgatcctttacacagagcagacttgaaacactctttttgtggaatttgcaagtggggatttcagccgctttgaggtcaatgttagaaaaggaaatatcttcgtataaaaactagacagaatgattctcagaaactcctttgtgatgtgtgcgttcaactcacagagttcaacctttcttttcatagagcagttaggaaacactctgtttataatgtctgcaattggatattcagacctctttgaggccttcgttggaaacgggatttcttcatattctgctagacagaagaattcccagtaacttccttgtgttgtgtgtgttcaactcacagagttgaactttcgtttacacagagcagatttgaaacactctttttgtggaatttgcaagtggagatttcaagcgctttgaggccaaaggcagaaaaggaaatatcttcgtataaaaactagacagaatcattctcagaacctgcttcgtgatgtgtgcgttcaactctcagagtttaacttttcttttcattcagcggtttggaaacactctgtttgtaaagtctgcacgtggaaattttgaccacttagaggccttcgttggaaacgggtttttttcatgtaaggctagacagaagaattcccagtaacttccttgtgttgtgtgcattcaactcacagagttgaacgttcccttagacagagcagatttgaaacactctatttgtgcaatttgcaagtgtagatttcaagcgctttaaggtcaatggcagaaaaggaaatatcttcgtttcaaaactagacagaatcattcccacaaactgcgttgtgatgtgttcgttcaactcacagagtttaacctttctattcatagagcagttaggaaacactctgtttgtaaagtctgtaagtggatattctgacatcttgtggccttcgttggaaacgggatttcttcatattctgctagacagaagaattctcagtaacttccttgtgttgtgtgtattcacctcacagagttgtatgatcctttacacagaagagtcttgaaacactctttttgtggaatttgcaagtggagatttcagccgctttgaagtcaatggtagaataggaaatatcttcctatagaaactagacagaatgattctcataaactcctttgtgatgtgtgcgttcaactcacagagtttaacctttcttttcatagagcagttaggaaacactctgcttgtaaagtctgcaagtggatattcagccctctttgaggccttcgttggaaacgggtttttttcatataaggctagacagaagaattcccagtaacttccttgtgttgtgtgtgttcaactcacagagttgaactttcatttacacagagcagatttgaaacactctttttgtggaatttgcaaatggagatttcaagtgctttgaggccaaaggcagaaaaggaaatgtcttcgtttcaaaactagacagaatcattctcagaaactgctctgcgatgtgtgcgttcaactctcagagtttaacttttcttttcattcagcagtttggaaacactctgtttgtaaagtctgcacctggataacttgaccacttagaggccttcgttggaaacgggtttttttcctgtaaggctagacagaagaattcccagtaacttccttgtgttgtgtgcattcaactcacagagttgaacgttcccttagacagagcagatttgaaacactctatttgtgcaatttgcaagtgtacatttcaagcgctttaaggtcaacggcagaaaaggaaatatcttcgtttcaaaactagacagaatgattctaagaaacttctttgtgatgtgtgcgttcaactcacagagtttaacctttcttctcatagagcagttaggaaacactctgtttgtaaactctgcaagtggatattcagacctctttgaggccttcgttggaaacgggatttctccatactgtgcgagacagaagaattctcagtaacttccttgtgttgtgtggattcaactcacagagttgaacgatcctttacagagagcggacttgaaacactcgttttgtggaatttgcaagtggagatttcagccgctttgaggtcaatggtagaaaaggaaatatcttcgtacaaaaactagacagataatcattcccacaaactgcgttgtgatgtgttcgttcaactcacagcgttttacctttctgttcatagagcagttaggaaacactctgtttgtcaagtctgtaagtggatattctgacatcttgtggccttcgttggaaatgggatttcttcatattctgctagacagaagaattcccagtaacttccttgtgttgtgtgtattcaactcacagagttgaactttcatttacacagagcagattggaaacactctttttgtggaatttgcaagtggagatttcaagcgctttgaggccaaatgcagaaaaggaaatatcttcgtataaaaactagacagaatcattctcagaaactgctctgcgatgtgtgcgttcaactctcagagtttaacttttcttttcattcagcagtttggaaacactctgtttgtaaagtctgcacgtggatattttgaccacttagaggccttcgttggaaacgggtttctttcttgtaaggctagacagaagaattctcagtaacttccttgtgttgtgtgtattcaactcacagagttgaatgatcttttacacagaacagacttgaaacactctttttgtggaatttgcaagtggagatttcagccgctttgaggtcaatggtagaaaaggaaatatcttcgtataaaaactagacagaatgattctcagaaactcctttgtgatgtgtgcgttcaactcacagagtttaacctttcttttcatagagcagttaggaaacactctgtttgtaaagtctggaagtggatattcagacctctttgaggccttcgttggaaacgggatttcttcatattctgctagagagaagaattctcagtaacttccttgtgttgtgtgtattcaactcacagagttcaacgatcctttacacagagcagacttgaaacactctttttgtggaatttgcaagtggagatttcagccgctttgaggtcaatggtagaataggaaatatcttcctatagaaactagacagaatgattctcagaaactcctttgtgatgtgtgcgttcaactcacagactttaacctttcttttcatagagcagttaggaaacactctgtttgtaaagtctgcaagtggatattcagacctccttgaggccttcgttggaaacgggatttcttcatattatgctagacagaagaattctcagtaacttccttgtgttgtgtgtattcaactgacagagttgaactttcatttggagagagcagatttgaaacactgtttttgtggaatttgcaagtggagatttcaagcgctctggggccaaaggcagaaaaggaaatatcttcgtataaaaactagacagaatcattctcagaaactgctgtgtgatgtgtgcgttcaactctcagagtttaacttttcttttcattcagcggtttggaaacactctgtttgtaaagtctgcacgtggatattttgaccacttagaggccttcgttggaaacgggtttttttcatgtaaggctagacagaagaattctcagtaacttccttgtgttgtgtgtattcaactcacagagttgaacgatcctttacacagagcagacttgaaacactctttttgtggaatttgcaagtggagatttcagccgctttgagttcaatggtagaataggaaatatcttcctatagacactagacagaatgattctcagaaactcctttgtgatgtgtgcgttcaactcacagagttcaacctttcttttcatagagcagttgggaaacactctgtttgtaaaatctgcaagtggatattcagacttctttgaggccttccttggaagcgggatttcttcatattcagctagacagattaattctcaataacttccttgtgttgtgtgtattcaactcacagagttgaacgatcctttacagagagcagacttgaaacactctttttgtggaatttgcaagtggagatttcagccgctttgaggtcaatggtagaatagggaatatcttcctatagaaactagacagagtgattctcagaaactcctttgtgatatctgcgttcaactaacagagtttaaactttcttttcatagagcagttaggaaacactctgtttgtaaagtctgcaagtggatattcagacctccttgaggccttcgttggaaacgggatttcttcatattctgctatacagaagaattctcagtaactgccttgtgttgtgtgtattcaactcacacagttgaacgatcctttacacagagcagacttgaaacactctttttgtggaatttgcaagtggagatttcagccgctttgaggtcaatggtagaataggaaatatcttcctatagaaactagacagaatgattctcagaaactcctttgtgatgtgtgcgttcaactcacagagtttatcctttcttttcatagagcagttgggaaacactctgtttgtaaagtctgcaagtggatattcagacatccttgaggctttcgttggaaacgggatttcttcatattctgctagaaagaagaattcccagtaacttccttgtgttgtgtgcattcaactcacagagttgaacgttcccttagagagagcagatttgaaacactctatttgtgcaatttgcaagtgtagatttcaagcgctttaaggtcaatggcagaaaaggaaatatcttcgtttcaaaactagacagaatcattcccacaaactgcgttgtgatgtgttcgttcaactcacagagtttaacctttccgttcatagagcagttaggaaacacactgtttgtaaagtctgtaagtggatattctgacatcttgtggccttcgttggaaacgggatttcttcatattctgctagacagaagaattctcagtaacttccttgtgttgtgtgtattcaactcacagagttgaactgatcctttacacagagcagacttgaaacactctttttgttgaatttgcaagtggagatttcagccgctttgaggtcaatagtagaaaaggaaatatcttcgtagaaaaactagacagaatgattctcagaaactcctttgtgatgtgtacgttcaactcacagagtttaacctttcttttcttagagcagttaggaaacactctgtttgtaaagtctgcaagtggatattcagacctctttgagtccttcgttggaaacgggtttttttcatataaggctagacagaagaattcccagtaacttccttgtgttgtgtgtgttcaactcacagagttgaactttcatttacacagagcagatttgaaacactccttttgtggaatttgcaagtggagatttcaagcgctttgaggccaaaggcagaaaaggaaatatcttcgtttcaaaactagacagaatcattctcagaaactgctgcgtgatgtgtgcgttcaactctcagagtttaacttttcttttcattcagcggtttggaaacactctgtttgaaaagtctgcacgtggatattttgaccacttagaggccttcgttggaaacgggtttttttcatgtaaggctagagagaagaattcccactaacttccttgtgttgtgtacattcaactcacagagttgaacgttcccttagacagagcagacttgtaacactctttttgtggaatttgcaagtggagatttcagccgctttcaagtcaaaggtagaaaaggaaatatcttcctataaaaactagacagaatcattcccacaaactgcgttgtgatgtgttcgttcaactcacagagtttaacctttctgttcatagagcagttaggaaacactctgtttgtaaagtctgcaagtggatattcagacctctttgaggccttcgttggaaacgggatttcttcatattctgctagacagaagaattctcagtaacttccttgtgttgtgtgtattcaactcacacagttgaacgatcctttacacagagcagacttgtaacactctttttgtggaatttgcaagtggagatttcagccgcttttaagtcaaaggtagaaaaggaaatatcttcctataaaaactagacagagtgattctcagaaactcctttgtgatgtctgcgttcaactcacagagtttaacctttcttttcatagagcagttaggaaacactctgtttgtaaagtctgcaagtgcatattcagacctccttgaggccttcgttggaaacgggatttcttcatattctgctatacagaagaattctcagaaacttccttgtgttttgtgtgttcaactcacagagttgaacgatcctttacacagagcagacttgaaacactctttttgtggaatttgcaagtggagatttcagccgctttgaggtcaatggtagaaaaggaaatatcttcgtataaaaactagacagaatcattctcagaaactgctgcgtgatgtgtgcgttcaactctcagagtttaccttttcttttcattcagcggtttggaaacactctatttgttaaagtctgcacgtggatattttgaccacttagaggccttcgttggaaacgggattttttcatgtaaggctagacagaagaattcccagtaacttccttgtgttgtgtgcattcaactcacagagttgaacgttcccttagacagagcagatttgaaacactctatttgtgcaatttgcaagtgtagatttcaagcgctttagggtcaaaggcagaaaaggaaatatcttcgtttcaaaactagacagaatcattcccacaaactgcgttgtgatgtgttcgttcaaatcacagagtttaacctttcttttcatagagcagttaggaaacagtctgcttgtaaattctgtaagtggatattctgacatcttgtggccttcgttggaaacggcatttcttcatattctgctagacagaagaattctcagtaacttccttgtattgtgtgtattcaactcacagagttgaacgatcctttacacagagcagacttgaaacactctttttgaggaatttgcaagtggagatttcagccgctttgaagtcaatggtagaaaaggaaatatcttcgtataaaaactagacagaatgattctcagaaactcatttgtgatgtgtgcgttcaactcacagagtttaacctttcttttcatagagcagttaggaaacactctgtttgtaaagtctgcaagtggatattcagacctttttgaggccttcgttggaaacgggatttcttcatatgatgctacacagaagaattctcagtaacttccttgtgctgtgtgtattcaactgacagagttgaactttcatttagacagagcagatttgaaacactctttttgtggaatttgcaagtggagattttaagcgctttgaggccaaaggcagaaaaggaaatatcttcgtataaaaactagacagaatcattctcagaaactgctctgcgatgtgtgcgttcaactctcagagtttaacttttcttttcattcagcagtttgaaaacactctgtttgtaaagtctgcacgtggatattttgaccacttagaggccttcgttggaaacgggtttttttgcctgtaaggctagacagaagaattcccagtaatttccttgtgttgtgtgcattcaactcacagagttgaacgttcccttagacagagcagatttgaaacactctatttgtgcaatttgcaagtgtagatttcaagcgctttaaggtcaatggcagaaaaggaaatatcttcatttcaaaactagacagaatcattcccacaaactgcattgtgatgggttcgttcaactcacagagtttaacctttctgttcatagagcagttaggaaacactctgtttgtaaagtctgtaagttgatattcagacctctttgaggccttcgttggaaatggatttcttcatattctgttagacagaagaattctcagaaacttcgttgtgttgtgtgttttcaactcacagagttcaacgatcctttacacagagtagacttgaaacactctttttgtggaattggcagggtggagatttcagccgctttgaggtcaatggaagaaaaggaaatatcttcgtataaaaactagacagagtgattctcagaaactcctttgtgatgtctgtgttcaactcacagagtttaacctttcttttcatagagcagttaggaaacactctgtttgtaaagtctgcaagtggatattcagacctccttgaggccttcgttggaaacgggatttcttcatattctgctatacagaagaattcccagtaacttccttgtgttgtgtgtgttcaactcacagagttgaactttcatttacacagagcagatttgaaacactctttttgtggaatttgcaaatggagatttcaagcgctttgaggccaaaggcagaaaaggaaatatcttcgtagaaaaactagacagaatcattctcagaaactgctgcgtgatgtgtgcgttcaactctcagagtttaacttttcttttcatttagcggtttggaaacactctgtttgtaaagtctgcacgtggatattttgaccacttagaggccttcgttggaaacgggttttttttcatgtaaggctagacagaagaattcccagtaacttccttgtgttgtgtgcattcaactcacagagttgaacgttcccttagacagagcagatttgaaacactctatttgtgcaatttgcaagtgtagatttcaagtgctttcaggtcaatggcagaaaaggaaatatcttcgtttcaaaactagacagaatcattcccacaaactgcgttgtgaggtgttcgttcaactcacagagtttaaactttcttttcatagagcagttaggaaacagtctgtttgtaaattctgtacgtggatattctgacatcttgtggccttcgttggaaacgggatttcttcatattctgctagacagaagaattctcagtaacttccttgtgttgtgtgtattcaactcacagagttgaacgatcgtttacacagagcagacttgaaacactccttttgtggaatttgcaagtggagatttcagccgcgttgaggtcaatggtagaaaaggaaatatcttcgtataaaaactagacagaatgattctcagaaactcctttgtgatgtgtgcgttcaactcacagagtttaacctttcttttcatagagcagttaggaaacactctgtttgtaaagtctgcaagtggatattcagacctgtttgaggccttcgttggaaacgggtttttttcatataaggctagacagaattctcagtaacttccttgtgttgtgtgtgttcaactcacagagttgaactttcatttacacagagcagatttgaaacactctttttgtggaatttgcaagtggagatttcaagcgctttgaggccaaaggcagaaagggaaatatcttcgtataaaaactagacagaatcattctcagaaactgctctgcgatgtgtgcgttcaactctcagagtttaacttttcttttccttcagcagtttggaaacactctgtttgtaaagtctgcacgtggataatttggccacttagaggccttcgttggaaacgggttttttcatgtaaggctagacagaagaattcacagtaacttccttgtgttgtgtgcattcaactcacatagttgaacgttcccttagacagagcagatttgaaacactctatttgtgcaattcgcaactgtagatttcaagcgctttaagatcaatggcagaaaaggaaatatcttcgtttcaaaactagacagaatcattcccacaaactgcgttgtgatgtgttcgttcaactcacagagtttaacctttgtgttcatagagcagttaggaaacactctgtttgtaaagtctgtaagtggatattctgacatcttgtggccttcgttggaaacgggatttcttcatattctgctagacagaataattctcagtaacttccttgtgttgtgtgtattcaactcacagagttgaacgatcctttacagagaggagacttgaaacactctttttgtggaatttgcaagtggagatttcagccgctttgaggtcaatggtagaataggaaatatcttcctatagaaactagacagaataattctcagaaactcctttgtgatgtgtgtgtccaactcacagagtttaacctttcttttcatagagcagttaggaaacactctgtttgtaaagtctgcaagaggatattcagacctctttgaggccttcgttggaaacgggtttttttcatataaggctagacagaataattctcagtaacttccttgtgttgtgtgtattcaactcacagagttgaaggatcctttacagagagcaggcttgaaacacgctttttgtcgaatttgcaagtggagatttcagccgctttgaggtcaatggtagaataggaaatatcttcttatagaaactagacagaatcattctcagaaactgctctgcgatgtgtgcgttcaactctcagagtttaacttttcttttcattcagcagtgtggaaacactctgtttgtaaagtctgcacgtggatattttgaccgcttagaggccttcgttggaaacgggtttttttcctgtaaggctagacagaagaattcccagtaacttccttgtgttgtgtacattcaactcacagagttgaacgttcccttagacagagcagatttgaaacactctttttgtgcaattggcaaatggagatttcaagcgctttaaggtcaatggcagaaaaggaaatatcttcgtttcaaaacgagacagaatcattcccacaaactgcgttgtgatgtgttcgttcaactcacagagtttaacctttctgttcatagagcagttaggaaacactctgtttgtaaagtctgcaagtggatattcagacctccttgaggtcttcgttggaaacgggatttcttcatattctgctagacagaagaattctcagtaacttccttgtgttgtgtgtattcacctcacagagttgaacgatcctttacacagagcagacttgtaacactctttttgtggaatttgcaagtggtgatttcagccgctttgaagtcaaaggtagaaaaggaaatatcttcctataaaaactagacagagtgattctcagaaactcctttgtgatgtctgcgttcaactcacagagtttaaactttcttttcacagagcagttaggaaacactctgtttgtaaagtctgcaagtggatattcagacctccttgaggccttcgttggaaacgggatttcttcatattctgctatacagaagaattcccagtaacttccttgtgttgtgtgtgttcaactcacagagctgaactttcatttacacagagcagatttgaaacactctttttgtggaatttgcaaatggagatttcaagcgctttgaggccaaaggcagaaaaggaaatatcttcgtttcaaaactagacagaatcattctcagaaactgctgcgtgatgtgtgcgttcaactctcagagtttaacttttcttttcattcagcggtttggaaacactgtgtttgtaaagtctgcacgtggatattttgaccacttagaggccttcgttggaaacgggttgttttcatgtaaggctagacagaagaattcccagtaacttccttgtgttgtgtgcattcaactcacagagttgaacgttcccttagacagagcagatttgaaacactctatttgtgcaatttgcaagtgtagatttcaagcgctttaaggtcaatggcagaaaaggaaatatcttcgtttcaaaactagacagaatgattctcagaaacttctttgtgatgtgtgcgttcaactcacagagtttaacctttcttttcatagagcagttaggaaacactctgtttgtaaagtctgcaagtggatattcagacctcttagaggccttcgttggaaacggtatttcttcatactctagacagaagaattctcagtaacttccttgtgttgtgtgctttcaactcacagagttgaacgatcctttacacagagcagattagaaacactctttttgtggaatttgcaagtggagatttcagccgctttgaggtcaatggtagaaaaggaaatatcttcgtatagaaactagacagaatgattctcagaaactcctttgtgatgtgtgcgttcaactcacagagtttaacctttcttttcatagagcagttaggaaacactctgtttgtaatgtctgcaagtggatattcagacatccttgaggctttcgttggaaacgggatttcttcatattctgctagaaagaagaattctcagtaacttccttgtattgtgtgtattcaactgacagagttgaactttcatgtagagagagcagatttgaaacactgtttttgtggaatttgcaagtggagatttcaagcgctttggggccaaaggcagaaaaggaaatatcttcgtataaaactagacagaatcattctcagaaactgctgtgtgatgtgtgcgttcaactctcagagtttaacttttcttttcattcagcggtttggaaacactctgtttgtaaagtttgcacgtggaaattttgaccacttagaggccttcgttggaaacgggtttttttcatgtaaggctcgacagaagaattcccagtaacttccttgtgttgtgtgcattcaactcacagagttgaacgttcccttagacagagcagatttgaaacactctatttgtgcaatttgcaagtgtagatttcaagcgctttaaggtcaatgacagaaaaggaaatattcttcgtttcaaaactagacagaatcattcccacaaactgcgttgtgatgtgatcgttcaactcacagagtttaacctttctgttcatagagcagttaggaaacactctgtttgtaaagtctgtaagtggatattctgacatcttgtggccttcgttggaaacgggatttcttcatattctgctggacagaagaattctcagtaacttccttgtgttgtgtgtattcaactcacagacttgaacgatcctttacagagagcagacttgaaacactctttttgtggaatttgcaagtggagatttcagccgctttgagctcaatggtagaataggaaatatcttcctatagaaactagacagaatgattctcagaaactcctttgtgatgtgtgcgttcaactcacagagtttaacctttcttttcatagagcagttaggaaactctctgcttgtaaagtctgcaagtggatattcagccctctttgaggccttcgttggaaacgggtttttttcatatagggctagacagaagaattcccagtaacttccttgtgttgtgtgtgttcaactcacagagttgaactttgatttacacagagcagattcgaaacactctttttgtggaatttgcaagtggagatttcaagcgctttgaggccaaaggcagaaaaggaaatattcttcgtataaaaactagacagaatcattctcagaaaccgctctgtgatgtgtgcgttcaactctcagagtttaacttttcttttcattcagcagtttggaaacactctgtttgtaaagtctccacgtggatattttgaccacttagaagccttcgttggaaacgtgttttttttcatgtaaggctagacagaagaattcccagtaacttccttttgttgtgtgcattcaactcacagagatgaacgttcccttcgacagagcagatttgaaacactctatttgtgcaatttgcaagtgtagatttaaagcgctttaaggtcaatggcagaaaaggaaatatcttcgtttcaaaactagacagaatcattcccacaaactgcgttgtgatgtgttcgttcaactcacagagtttaacctttctgttcatagagcagtgaggaaacactctgtttgtaaagtctgtaagtggatattctgacatcttgtggccttcgttggaaacgggatttcttcatattctgctagacagaagaattctcagtaacttctttgtgttgtgtgtattcaactcacagagttgaacgatcctttatacagagcagacttgaaacactctttttgtggaatttgcaagtggagatttcagccgctttgaggtcaatggtagaacaggaaatatcttcctatagaaactagacagaatgattctcagaaactcctttgtgatgtgtgcattcaactcacagagtttaacctttcttttcatagagcagttaggaaacactctgtttgtaaagtctgcaagtggatattcagaactccttgaggacttcgttggaaacgggatttctacatattatgctagacagaagaattctcagaaacttccttgggttgtgtgtattcaactcacagagttgaacgatcgtttacacagagcagacttgaaacactctttttgtggaatttgcaagtggagatttcagccgctttgaggtcaatggtagaaaaggaaatatctttgtataaaaactagacagaatgattctcagaaactcctttgtgatgtgtgcgttcaactcacagagtttaacctttcttttcatagagcagttaggaaacactctgcttgtaaagtcttcaagtggatattcagccctctttgaggccttcgttggaaacgggtttttttcatataaggctagacagaagaattcccagtaacttccttgtgttgtgtgtgttcaactcacagagttgaacttccatttacacagagcagatttgaaacactctttttgtggaatttgcaagtggagatttcaagcgctttgaggccaaaggcagaaaaggaaatatctttcgtttcaaaactagacagaatcattctcagaaactgttctgtgatgtgtgcgttcaactctcagagtttaacttttcttttcattcagcagtttggaaacactctgtttgtaaagtctgcacgtggataatttgaccacttagaggccttcgttggaaacgggtttttttcatgtaaggctagacagaagaattcccggtaacttccttgtgttgtgtgtattcaactcacagagttgaacgttcagttagacagagcagatttgaaacactctttttgtgcaatttggaagtggagatttcagccactttgaggtcaatggcaggaaaggaaatatcttcttttcaaaactatacagaatgtttctcagtaagttctttgtgatgtgtgcgttcaactcacagggtttaacctttcttttcatagagcagttagaaagcactctgtttgtaaagtcttcaagtggatattcagacctcttttaggccctcgttggaaacgagatttcttcatattatgctagacagaagaattctcagtaacttccttgtgttgtgtgtattcaacacacagagttgaacgatcctttacacagagcagacttgaaacactctttttgtggaatttgcaagtggagatttcagccgctttgaggtcaatggtagaaaaggaagtatcttcgtataaaaaccagacagaatgattctcagaaactcctttgtgatgtgtgcgttcaactcacagagtttaacctttcttttcatagagcagttagaaaacactctgtttgtaaagtctgcaagtggatattcagacctctttgaggccttcgttagaaacgggatttcttcatattctgctagacagaagaattcccagtaacttccttgtgttgtgtgtgttcaactcacagagttgaactttcatttacacagagcagatttgaaacactctttttgtgaaatttgcaagtggagatttcaagcgctttgaggccaaaggcagaaaaggaaatatcttcgtttcaaaactagacagaatcattctcagaaactgctgtgtgatgtgtgcagttcaactctcagagtttaacttttcttttcattcagcggtttggaaacactctgtttgtaaagtctgcacgtggatattttgaccacttagaggccttcgttggaaacgggattttttcatgtaaggctagacagaagaattcccagtaacttccttgtgttgtgtgcattcaactcacagagacgaacgttcccttagacagagcagatttgaaacactctattggtgtaatttgcaagtgtagatttcaagcgctttaaggtcaatggcagaaaaggaaatatctccgtttcaaaactagacagaatgattctgagaaactcctttgtgatgtgtgcgtacaactcacagagtttaacctttcttttcatagagcagataggaaacactctgtttgtaaagtctgcaagtggatattcagacctccttgaggccttcgttggaaacggcttttcttcctattatgctagacagaagaattctcagtaacttccttgtgttgtgtgtattcaactcacagagttgaatgatcctttacacagagcagacttgaaacactctttttgtggaatttgcaagtggagatttcagccgctttgagttcaatggtagaataggaaaaatcttcctatagaaactagacagaatgattctcagaaacttctttgtgatgtgtgcgttcaactcaccgagtttaacctttcttttcatagatcagttaggaaacactctgtttgtaaactctgcaagtggatattcagacctcttggaggccttcgttggaaacgggatttcttcatactatgctagacagaagaattctcagaaacttccttgtgttgtgtgtattcaactcacagagttgaacgatcctttacacagagcagacttgaaacactctttttgtggaatttgcaagtggagatttcagccgctttgtggtcaatggtagaaaaggaaatatcttcgtatagaaactagacagaatgattctcagaaactcctttgtgatgtgggcgttgaactcacagagtttaacctttcttttcatagagcagttaggaaacactctgtttgtaaagtctgcacatggatattttgaccacttagaggccttcgttggaaacgtgtttttttcatgtaaggctagacagaagaattcccagtaatttccttgtgttgtgtgcagtcaactcacagagttcaacgttcccttagacagagcagatttgaaacactctatttgtgcaatttgcaagtgtagatttcaagcgctttaaggtcaatggcagaaaaggaaatatcttcgtttcaaaactagacagaatcattcccacaaactgcgttgtgatgtgttcgttcaactcacagagtttaacctttcttttcatagagcagttaggaaacactctgttgtaaattctgtaagtggatattctgacatcttggggccttcgttggaaacgggatttcttcatattctgctagacagaataattctcagtaacttccttgtgttgtgtgtattcaactcacagatttgaacgatcctttacagagagcagacttgaaacactctttttgtggaatttgcaagtggagatttcagccgctttgaggtcaatgttagaaaaggaaatatcttcgtataaagactagacagaatgattctcagtaaactcctttgtgatgtgtgtgttcaactcacagtattttaacctttcttttcatagagcagttaggaaacactctgtttgtaaagtctgcaagtggatactcatacctctttgaggccttcgttggaaacgggtttttttcatataaggctagacagaagaattctcagtaacttccttgtgttgtgtgtattcaactgacagagttgaactttcattaagagagagcagatttgaaacactgtttttgtggaatttgcaagtggagatttcaagcgctttggggccaaagcagaaaaggaaatatcttcgtataaaaactagacagaatcgttctcagaaactgctctgcgatgtgtgcgttcaactctcagagtttaacttttcttttcattcagcagtttggaaacactctgtttgtaaagtctgcacgtggataatttgaccacttagaggccttcgttggaaacaggtttttttcatgtaaggctagacagaagaattcccagtaacttccttgtgttgtgtgcattcaactcacagagttgaacgttcccttagacagagcagatttgaaacactctatttgtgcaatttgcaagtgtagatttcaagcgcattaaggtcaatggcagaaaaggaaatatcttcgtttcaaaattagacagaatcattcccacaaactgcgttgtgatgtgttcgttcaactcacagagtttaacctttctgttcatagagcagttaggaaacactctgtttgtaaagtctgcaagtggatattcagacctccttgaggccttcgttggaagcgggatttcttcatattctgctagacagaagaattcccagtaacttccttgtgttgtgtgtgttcaactcacagagttgaactttcatttacacagagcagatttgaaacactctttttgtggaatttgcaaatggagttttcagccgcgttgaggtcaatggtagaaaaggaaatatcttcgtttcaaaactagacagaatgattctcagaaactcctttgtgatgtgtctgttcaactcacagagtttaacatttcttttcatagagcagttaggaaacactctgtttgtaaagtctgcaagtggatattcagacctctttgaggccttcgttggaaacgggtttttttcatataaggctagacagaagaattctcagtaacttccttgtgttgtgtgtattcaactgacagagatgaactttcatttagagagagcagatttgaaacactgtttttgtggaatttgcaagtggtgatttcaagcgctttggggccaaaggcagaaaaggaaatatcttcgtataaaaactagacagaatcattctaagaaactgctctgcgatgtgtgtgttcaactctcagagtttaacttttcttttccttcagcagtttggaaacactctgtttgtaaagtctgcacgtggataatttgaccacttagaggccttcgttagaaacgggtttttttcatgtaaggctagacagaagaattcccggtaacttctttgtgttgtgtgcattcaactcacagagttgaacgttcctttagacagagcagatttgaaacactctttttgtgcaatttgcaagtggagatttcaagcgctttaaggtcaatggcagaaaaggaaataacttcgtttcaaaactagacagtatcattcccacaaactgcgttgtgatgtgttcgctcaactcacagagtttaacctttcttttcatagagcagttaggaaacagtctgtttgtaaattctgtaagtggatattctgacatcttgtggccttcgttggaaacgggatttcttcatattctgctagacagaagaattctcagtaacttcccttgtgttgtgtgtattcaactcacagagttgaacgatcctttacagagagcagacttgaaacactctttttgtggaatttgcaagtggagatttcagccgctttgaggtcaatggtagaaaaggaaatatcttcctataaagactagacagaatgattctcagaaactcctttgtgatgtgtgcgttcaactcacagagttcaacctttcttttcatagagcagttgggaaacgctctgtttgtaaagtctgcaaatggatattcagacttctttgaggccttcgttggaagcaggatttcttcatattctgctagacagaagaattctcagtaacttccttgttttgtgtgtattcaactgacagagttgaactttcgtttagagagagcagatttgaaacactgtttttgtggaatttgcaagtggagatttcaagcgctttggggccaaaggcagaaaaggaaatatcttcgtataaaaactagacagaatcattctcagaaaatgctttgtgatgtgtgcgttcaactctcagagtttaacttttgttttcattcagcagtttggaaacactctgtttgtaaagtctgcacgtggatattttgaccacttagaggccttcgttggaaacgggtttttttcatgtaagggtagacagaagaattcccagtaacttccttgtgttgtgtgcattcaactcacagagttgaacattcccttagacagagcagatttgaaacacactatttgtgcaatttgcaagtgtagatttcaagcgctttaaggtcaatggcagaaaaggaaatatcttcgtttcaaaactagacagaatgattctcagaaactcctttgtgatgtgtgcgttcaactcacatagttgaacctttcttttcatagagcagttaggaaacactctgtttgtaaagtctgtaagtggatattcagacatctttgaggctttcgttggaaacgggatttcttcatattctgctatacagaagaattctcagtaacttccttgtgttgtgtttattcaactcacaggagttgaatgatcctttacacagcagcagacttgaaacactctttttgtggaatttgcaagtggagatttcagccgctttgtggtcaatggtagaaaaggaaatatcttcgtataaagactagacagaatgattctcagaaactcctttgtgatgtgtgcgttcaactcacagagtttaacctttcttttcatagagcagttaggaaacactctgtttgtaaagtctgcaagtggatattcagacctctttgaggccttcgttggaaacgggatttcttcatattctgctggacagaagaattctcagtaactttccttgtgttgtgtgtattcaactcacagagttgaacgatcctttacacagagcagacttcaaacactctttttgtggaatttgcaagtggagatttcagccgctttgaggtcaatagtagaaaaggaaatatcttcgtagaaaaactaggcagaaatcattctcagaaactgctctgcgatgtgtgcgttcaactctcaggagtttaacttttcttttcattcagcagtttggaaacactctgtttgtaaagtctgcacgtggatattttgaccacttagaggccttcgttggaaacgggtttttttcctgtaaggctagacagaagaattcccagtaacttccttgtgttgtgtacattcatctcacagagttgaacgttcccttagacagagcagatttgaaacactctttttgtgcaattggcaaatggagatttcaagcgctttaaggtcaatggcagaaaaggaaatatcttcgtttcaaaactagacagaatcattcccacaaactgcgttgtgatgtgttcgttcaactaacagagtttaacctttcttttcatagagcagttaggaaacagtctgtttgtaaattctgtatgtggatattctgacatcttgtggccttcgttggaaacgggatttcttcatattctgcttgacagaagaattctcagaatcttccttgtgttgtgtgtattcaactcacagagttgaatgatggtttacacagagcagatttgaaacactcatttggtggaatttgcaagtggagatttcagccgctttgaggtcaatggtagaaaaagaaatatcttcgtataacaactagacagaatgattctcagaaactcctttgtgatgtgtgcgttcaactcacagagtttaacctttcttttcatagagcagttaggaaacactctttctgaaaagtctgcaagtggatattcagacctctttgaggccttcgttggaaacgggatttcttcatattctgctagacagaggaattcccagtaacttccttgtgttgtgtgtgttcaactcacagagttgaactttcatttacacagagcagatttgaaacactctttttgtggaatttgcaagtggagatttcaagcgctttgaggccaaaggcagaaaaggaaatatcttcgtttcaaaactagacagaatcattctcagaaactgctgcatgatgtgtgcgttcaactctcagagtttaacttttcttttcattcagcggtttggaaacactctgtttgtaaagtctgcacgtggatattttgaccacttagaggccttcgttggaaacaggttttttgcatgtaaggctagacagaagaatttccagtaaattccttgtgttgtgtacattcaactcacagagttgaacgttcccttagacagagcagatttgaaacactctttttgtgcaattggcaagtggagatttcaagcgctttaaggtcaatggcagaaaaggaaatatcttcgtttcaaaactagacagaatcattcccacaaactgcgttgtgatgtgttcgttcaactcacagagtttaacctttctgttcatagagcagttaggaaacactctgtttgtaaagtctgcaagtggatattcagacctctttgaggccttcgttggaaacgggatttcttcatattctgctagacagaagaattctcagaatcttccttgtgttgtgtgtattcaactcacagagttgaacgatcctttacacagagcagacttgatgcactctttttgtggaatttgcaagtggagatttcagccgctttgaggtccatggtagaaaaggaaatatcttcgtataaaaactagacagaatgattctcagaaacttctttgtgatgtgtgcgttcaactaacagagtttaacatttcttttcatagagcagttaggaaacactctgtttgtaaactctgcaagtggatattcagacctctttgaggccttcgttggaaacgggatttcttcatactgtgctagacagaaggattcccagtaacttccttgtgttgtgtgtgttcaactcacagagttgaactttcatttacaatgagcagatttgaaacactctttttgtggaatttgcaagtggagatttcaagcgctttgaggccaaaggcagaaaaggaaatatcttcgtataaaaactagacagaatcattctcagaaactgctctgcgatgtgtgcgttcaactctcagagtttaacttttcttttcattcagcagtttggaaacactctgtttgtaaagtctgcacgtgcataatttgaccacttagaggccttcgttggaaacaggtttttttcatgtaaggctagacagaagattcccagtaacttccttgtgttgtgtacattcaactcacagagttgaacgttcccttagacagagcagatttgaaacactctttttgtgcaattggcaaatggagatttcaagcgctttaaggtcaatggcagaaaaggaaatatcttcgtttcaaaactagacagaatcattcccacaaactgcgttgtgatgtgttcgttcaactcacagggtttaacctttctattcatagagcagttaggaaacactctgtttgtaaagtctgtaagtggatattctgacatcttgtggccttcgttggaaacgggatttcttcacattctgctagacagaagaattctcagtaacttccttgtgttgtgtttattcaactcacagagttgaatgatcctttacacagagcagacttgaaacactgtttttgtggaatttgcaagtggagatttcagccgctttgaagtcaatggtagaaaagtaaatatcttcgtataaagactagacagaatgattctcagaaacttcattgtgatgtgtgcgttcaactcacagagtttaacctttcttttcatagagcagttaggaaacactctgtttgtaaactctgcaagtggatattcagacctctttgaggccttcgttggaaacgggttttttcatgtaaggctagacagaagaattcccagtaacttccttgtgttgtgtgtgttcaactcacagagttgaactttcagttacacagagcagatttgaaacactctttttgtggactttgcaaatggagatttcaagcgctttgaggccaaaggcagaaatggaaatatcttcgtataaaaactagacagaatcattctcagaaactgctctgcgatgtgtgcgttcaactctcagagtttaacttttcttttcattcagcagtttggaaacactctgtttgtaaagtctgcacgtggataacttgaccacttagaggccttcgttggaaacgggtttttttcctgtaaggctagacagaagaattcccagtaacttccttgtgttgtgtgcattcaactcacagagttgaacgttcccttagacagagcagatttgaaacactctatttctgcaatttgcaagtgtagttttcaagcactttaaggtcaacggcagaaaaggaaatatcttcgtttcaaaactagacagaatcattcccacaaactgcgttgtgatgtgctcgttcatctcacagagtttaacctttcttttcatagagcagtttggaaacagtctgtttgtaaattctgtaagtggatattctgacatcttgtggccttcgttggaaacgggatttcttcatattctgctagacagaagaattctcagtaacttccttgtgttgtgtgtattcaactcacagagttcaacgatcctttacacagagcagacttgaaacactctttttgtggaatttgcaagtggagatttcagccgctttgaggtcaatggtagaaaaggaaatatcttcgtataaaaactagacagaatgattctcagaaactcctttgtgatgtgtgcgttcaactcacagagtttaacctttcttttcatagagcagttgggaaacactctgtttgtaaagtctgcaagtggatattcagacttcctttgaggccttcgttggaagcgggatttcttcatgttctgctagacagaagaattcccagtaacttccttctgttgtgtgtgttcaactcacagagttgaactttcatttacacagagcagatttgaaaaactctttttgtggaatttgcaagtggagatttcaagcgctttgaggccaaaggcagaaaaggaaatatcttcgtataaaaactagacagaatcattcttagaaactgctctgcgatgtgtgtgttcaactctcagagtttaacttttcttttcattcagcagtttggaaacactctgtttgtaaagtctgcacgtggatattttcaccacttagaggccttcgttggaaacgggtttttttcctgtaaggctagacagaagaattcccagtaacttccttgtgttgtgtgcattcaactcacaaagttgaacgttcccttagacagagcagatttgaaacactctatttgtgcaatttgcaagtgtagatttcaagcgctttaaggtcaacggcagaaaaggaaatatcttcgtttcaaaactagacagaatcattcccacaaactgcgttgtgatgtgctcgttcaactcacagagtttaacctttcttttcatagagtagttaggaaacagtctgtttgaaaattctgtaagtggatattctgacatcttgtggccttcgttggaaacgggatttcttcatattctgctagacagaagaattctcagtaacttcccttgtgttgtgtgtattcaactcacagagttgaacgatcctttacacagagcagacttgaaacactctttttgtggaatttgcaagaggagatttcagccgctttgaggtcaatagtagaaaaggaaatatcttcgtagaaaaactagacagaatgattctcagaaactcctttgtgatgtgtgcgttcaactcacagagtttaacctttcttttcatagagcagttaggaaacactctgtttgtaaagtctgcaagtggatattcagacctctttgaggccttcgttggaaacgggtttttgtcatataaggctagacagaagaattctcagtaacttccttgtgttgtgtgtattcaactgacagggttgaactttcatttagagagagcagatttgaaacactgtttttgtggaatttgcaagtggagatttcaggcgccttggggccaaaggcagaaaaggaaatatcttggtataaaaactagacagaatcattctcagaaactgctgcgtgatgtgtgcgttcaactctcagagtttaacttttcttttcattcagcggtttggaaacactctgtttgtaaagactgcacgtggatattttgaccacttagaggccttcgttggaaacgggttttcttcatgtaaggctagacagaagaattctcagtaacttccttgtgttgtgtttattcaactcacagagttgaatgatcctttacacagagcagacttgaaacactctttttgtggaatttgtaagtggagatttcagccgctttgaagtcaatggtagaaaagtaaatatcttcgtataaagactggacagaatgattctcagaaactcctttgtgatgtgtgcgttcaactcacagagtttaacctttctgttcatagagcagttaggaaacactctgtttgtaaagtctgtaagtggatattctgacatcttgtggccttcgttggaaacgggatttcttcatattctgctagacagaataattctcagtaacttccttgtgttgtgtgtattcaactcacagagttgaacgatcctttacagagagcagacttgaaacactctttttgtggaatttgcaagtggagatttcagccgctttgaggtcaaaggtagaataggaaatatcttcctatagaaactagacagaatgattctcataaactcctttgtgatgtgtgcgttcaactcacagagtttaacctttcttttcatagagcagttaggaaacactctgtttgtaaagtctgcaagtggatattcagacctctttgaggccttcgttggaaacgggatttcttcatattctgctagacggaagaattctcagtaacttccttgtgttgtgtgtattcaactgactgaattgaactttcatttagagagagcagatttgaaacactgtttttgtggaatttgcaagtggagatttcaagcgctttggggccaaaggcagaaaaggaaatatcttcgtataaaaactagacagaatcattctcagaaactgctctgcgatgtgtgcgttcaactctcagagtttaacttttcttttcattcagcagtttggaaacactctgtttgtaaagtctgcacgtggataatttgaccacttagaggccttcgttagaaacgggtttttttcatgtaaggctagacagaagaattcccagtaacttccttgtgttgtgtgcattcaactcacagagttgaacgttcccttagacagagcatatttgaaacactctatttgtgcaatttgcaagtgtagatttcaagcgctttaaggtcaatggcagaaaaggaaatatcttcgtttcaaaactagacagaatcattcccacaaactgcgttgtgatgtgttcgctcaactcgcagagtttaacgtttcttttcatagagcagttaggaaacagtctgtttgtaaattctgtaagtggatattctgacatcttgtggccttagttggaaacgggatttcttcatattctgctagacagaagaattctcagaaacttccttgtgttgtgtgtattcaactcacagagttgaacgatcctttacacagagcagacttgaaacacactttttttggtattttcaagtggagatttcagccaatttgaggtaaatggtagaaaaggaaatatcttcgtataaaaactagacagagtgattctcagaaactcctttgtgatgtctgcgttcaactcacagagtttaacctttcttttcatagagcagttaggaaacactctgtttgtaaagtctgcaggtggatattcagacctccttgaggccttcgttggaaacgggatttcttcatattctgctatacagaagaattcccagtaacttccttgttttgtgtgtgttcaactcacagagttgaactttcatttacacagagcagatttgaaacactctttttgtggaatttgcaaatggagatttcaagcgctttgaggccaaaggcagaaaaggaaatatcttcgtataaaaactagacagaatcattctcagaaactgctctgcgatgtgtgcgttcaactctcagagtttaactttgcttttcattcagcagtttggaaacactctgtttgtaaaatctgcacgtggataatttgaccacttagaggccttcgttggaaacgggtttttttcatgtaaggctagacagaagaattcccagtaacttccttctgttgcgtacattcagctcacagagttgaacgttcccttagacagagcagatttgaaacactctttttgtgcaattggcaagtggagatttcaagcgctttaaggtcagtggcagaaaaggaaatatcttcgtttcaaaactagacagaatgattctcataaactcctttgtgatgtgtgcgttcaactcacagagtttaacctttcttttcatagagcagttaggaaacactctgcttgtaaagtctgcaagtggatattcagacctccttgaggccttcgttggaaacgggatttcttcatattctgctagacagaagaattctcagtaacttccttgtgttgtgtgtattcaactcacagagttgaacgatcctttacacagagcagacttgaaaccctctttttgtggaatttgcaagtggagatttcagccgctttgaggtcaatggtagaaaaggaaactatcttcgtataaagactagacagagtgattctcagaaactcctttgtgatgtctgcgttcaactcacagagcttaacctttcttttcatagagcagttaagaaacactctgtttgtaaagtctgcaagtggatattcagacctccttgaggccttcgttggaaacgggatttcttcatattctgctatacagaagaattctcagaaacttccttgtgttgtgtgttttcaactcacagagttcaacgatcctttacacagagtagacttgaaacactctttttgtggaattggcagggtggagatttcagccgctttgaggtcaatggtagaaaaggaaatatcttcgtataaaaactagacagaatgattctcagaaactcctttgtgatgtgtgcgttcaactcgcatagtttaacctttcttttcatagagcagttaggaaacactctgtttgtaatgtctgcacgtggatatttggacttctttgaggccttcgttggaaacgggttttttccatgtaaggctagacagaagaattcccagtaacttccttgtgttgtgtacattcaactcacagagttgaacgttcccttagacagagcagatttgaaacactctttttgtgcaattggcaagtggagatttcaagcgctttaaggtcaatggcagaaaacgaaatatcttcgtttcaaaactacacagaatcattcccacaaacggcgttgtgatgtgttcgttcaactcacagagtttaacctttctgttcatagagcagttaggaaacactgtttgtaaagtctgtaagtggatattctgacatcgtgtggccttcgttggaaacgggatttcttcatattctgctagacagaataattctcagtaacttccttgtgttgtgtgtattcaactcacagagttgaacgatcctttacacagagcagacttgaaacattctttttgtggaatttgcaactggagatttcagccgctttgaggtcaattgtagaataggaaatatcttcctatagaaactagacagaatgattctaagaaactcctttgtgatgtgtgtgttcaactcacagagattaacctttcttttcatagagcagttagtaaacactctgtttataaagtctgcaagtggatattcagacccctttgaggccttcgttggaaacgggatttcttcatattatgctagacagaagaattctcagtaacttccttgtgttgtgtgtattcaactgacagagttgaactttcatttagagagagcagatttgaaacactgtttttgtggaatttgcaagtggagatttcaagcgctttggggccaaaggcagaaaaggaaatatcttcgtatgaaaactagacagaatcattctcagaaactgctctgtgatgtgtgcgttccactctcagagtttaacttttcttttcattcagcagtatggaaacactctgtttgtaaagtctgcacgtggatgttttgaccacttagtggccttcgttggaaacgggtttttttcatgtaaggctagacagaagaattctcagtaacttccttgtgttgtgtgtattcaactcacagagttgaatgatcctttacacagagcagacttgtaacactatttttgtggaatttgcaagtggagatttcagccactttgaagtcaaagtagaaaaggaaataacttcctataaaaactagacagaatcattcccacaaactgcgttgtgatgtgtttgttcaactctcagagtttaacctttctgttcatagagcagttaggaaacactctgtttgtaaagtctgcaagtggatattctgacatcttgttgccttcgttggaaacgggatttcttcatattctgctagacagaagaattctcagaatcttccatgtgttgtgtgtattcaactcacagagttgaacgatcctttacacagagcagacttgaaacactctttttgtggaatttgcaagtggagatttcagccgctttgaggtccatggtagaaaaggaaatatcttcgtataaaaactagacagaatgattctcagaaactcctttgtgatgtgtgtctgcaactcacagagtttaacctttcttttcatagagcagttagtaaacactctgtttataaagtctgcaagtggatattcagaccccttttaggccctcgttggaaacgggatttcttcatattctgccagacagaagaattcccagtaacttccttgtgttgtgtgtgttcaactcacagagttgaactttcatttacacagagcagatttgaaacactctttttgtggaatttgcaagtggagatttcaagcgctttgaggccaaatgcagaaaaggaaatatcttcgtttcaaaactagacagaaatcattctcagaaactgctgtgtgatgtgtgcgttcaactctcagagtttaacttttcttttcattcagcggtttggaaacactctgtttgtaaagtctgcacgtggaaattttgaccacttagaggccttcgttggaaacgggtttttttcatgtaaggctcgacagaagaattcccagtaacttccttgtgttgtgtacattcaactcacagagttgaacgttcccttagacagagcagatttgaaacactctttttgtgcaattggcaagtggtgatttcagccgctttgaggtcaatggtagaaaaggaaatatcttcgtataaaaactagacagaatcattcccacaaactgcgttgtgatgtgttcgttcaactcacagagtttaacctttcttttcatagagcagttaggaaacactctgttggtaaattctgtaagtggatattctgacatcttgtggcctccgttggaaacgggatttcttcatattctgctagacagaagaattctcagtaacttccttgtgttgtatgtattcaactcacagagttgaacgatcctttacacagagcagacttgaaacactctttttgtggaatttgcaagtggagatttcagccgctttgaggtcaatggtagaataggaaatatcttcctatagaaactagacagaatgattctcagaaacacctttgtgatgtgtgcgttcaactcacagagtttaacttttcttttcatagagcagttaggaaacactctgtttgtaaagtctgcaagtggatattcagacctctttgaggccttcgttggaaacgggatttcttcatattctgctagacagaagaattctcagtaacttccttgtgttgtgtgtattcaactcacagagttgaatgatcctttacacagaacagacttgaaacactcttgttgtggaatttgcaagtggagaattcaggcgctttgaggtcaacggtagaataggaaatatcttcctatagaaactagacagaatcattctcagaaactgctctgtgatgtgtgcgttcaactctcagagtttaacttttcttttcattcagcagtttggaaacactctgtttgtaaagtctgcacgtggatattttgaccacttagaggccttcgttggaaacgggtttttttcctgtaaggctagacagaagaattctcagtaacttccttgtgttgtgtacattcaactcacagagttgaacgttcccttagacagagcagatttgaaacactctttttgtgcaattggcaaatggagatttcaagcgctttaaggtcaatggcagaaaaggaaatatcttcgtttcaaaactagacagaatgattctcagaaactcctttgtgatgtgtgcgttcaactcacagagtttaacctttcttttcatagagcagttaggaaacactctgtttgtgaagtctgcaagtggatattcagacctctttgaggcctttgttggaaacgggatttcttcatattctgctagacagaagaattctcagaaacttcctggtgttgtgtgttttcaactcacagagttcaacgatcctttacacagagtagacttgaaacactctttttgttgaattggcaagtggagatttcagccgctttgaggtcaatggtagaaaaggaaatatcttcgtataaaaactagacagagtgattctcagaaactcctttgtgatgtctgcgttcaactcacagagtttaacctttcttttcatagagcagttaggaaacactccgtttgtaaagtctgcaagtggatattcagacctccttgaggccttcattggaaaccggatttcttcatattttgctatacagaagaattctcagtaacttccttgtgttgtgtgtattcaactgacagagttgaactttcatttagagagagcagatttgaaacactgtttttgtggaatttgcaaggggagatttcaagcgctttggggccaaaggcagaaaaggaaatatcttcgtataaaaactagacagaatcattctcagaaactgctctgcgatgtgtgcgttcaactctcagagtttaacttctcttttcattcagtagtttggaaaaactctgtttgtaaagtctgcacgtggataacttgaccacttagaggccttcgttggaaacgggtttttttcatgtaaggctagacagaagaattctcagtaacttccttgtgttgtgtgtattcaactgacagagttgaacgatcctttacacagagcatacttgaaacactcttcttgtggaatttgcaagtggagatttcagccgctttgaggtcaatggtagaataggaaatatcttcgtataaaaagtagacagaatgattctcagaaactcctttgtgatgtgtgcgttcaaatcacagagtttaacctttcttttcatagagcagttagggaacactctgtttgtaaagtctgcaagtggatattcagacctccttgaggccttcgttggaaacgggatttcttcatattctgctagacagaagaattctcagtaacttccttgtgttgtgtgtattcaactcacagatttgaacgatcctttacacagagcagacttgaaacactctttttgtggaatttgcaagtggagatttctgacgctttgaggtcaatggtagaataggaaatatcttcctatagaaactagacagaatgattctgagaaactcctttgtgatgtgtgcgttcaactcacagagtttaacctttcttttcatagagcagttaggaaacactctgtttgtaaagtgtgcaagtggatattcagaactccttgaggccttcgttggaaacgggatttcttcatattatgctagacagaagaattcccagtaacttccttctgttgtgtgtgttcaactcacagagttgaactttgatttacacagagcagatttgaaacactctttttgtggaatttgcaagtggagatttcaagcgctttgaggccaaaggcagaaaaggaaatatcttcgtataaaaactagacagaatcattctcagaaactgctctgcgatgtgtgcgttcaactctcagagcttaacttttcttttcattcagcagtttggaaacactctgtttctaaagtctgcacgtggataacttgaccacttagaggccttcgttggaaacgggtttttttcctgtaaggctagacagaagaattcccagtaacttccttgtgttgtgtacattcaacacacagagttgaacgttcccttagacagagcagatttgaaacactcttttagtgcaattggcaactggagatttcaagcgatttaaggtcaatggcagaaaagtaaatatcttcgtttcaaaactagacagaatcattgccacaaactgcgttgtgatgtgttcgttcaacccacagagtttaacctttctgttcatagagcagttaggaaacactctgtttgtaaagtatgaaagtggatattctgacatgttgtggccttcgttggaaacgggatttcttcatattctgctagacagaagaattctcagaaacttccttgtgttgtgtgttttcaactcacagagttgaacgatcctttacacagagcagacttgaaacactctttttgtggaatttgcaagtggagatttcagccgctgtgaggtcaatggtagaataggaaatatcttcctatagaaactagacagaatgattctcagaaactcctttgtgatgtgtgtgttcaactcacagagtttaacctttcttttcatacagcagttaggaaacactctgtttgtaaattctgcaagtggatattttgaccgctttgaggccttcgttggaaacgggtttttttcatgtaaggctagacagaagaattcccagtaacttccttgtgttgtgtgtgttcaactcacagagttgaactttcatttacccagagcagatttgaaacactctttttgtggaatttgcaagtggagatttcaagcactttgaggccaaaggcagaaaaggaaatatcttcgtttcaaaactagacagaatcattctcagaaactgctctgcgatgtgtccgttcaactctcagagtttaacttttcttttcattcagcagtttggaaacactctgtttgtaaagtctgcacgtggatattttgaccacttagaggccttcgttggaaacgggtttttttcctgtaaggctagacagaagaattcccagtaacttccttgtgttgtgtacattcaactcacagagttgaacgttcccttagacagagcagatttgaaacactctttttgtgcaattggcaagtggagatttcaagcgctttgaggtcaatggcagaaaaggaaatatcttcgtttcaaaactagacagaatcattcccacaaactgcgttgtgatgtgttcgttctactcacagagtttaacctttcttttcatagagcagttaggaaacagtctgtttgaaaattctgtaaggggatattctgacatcttgtggccttcgttggaaacgggatttcttcatattctgctagacagaagaactcccagtaacttccttgtgttgtgtgtgttcaactcacagagttgaactttcatttacacagagcagatttgaaacactctttttgtggaatttgcaaatggagatttcagccgcgttgaggtcaatggtagaaaaggaaatattcttcgtttcaaaactagacagaatgattctcagaaactcctttgtgatgtgtgcgttcaactcacagagtttaacctttcttttcatagaccagttaggaaacactctgtttgtaaagtctgcaagtggatattcagacctccttgaggccttcgttggaagcgggatttcttcatgttctgctagacagaagaattctcagaaacttccttgtgttgtgtgttttcaactcacagagttgaacgatcctttacacagagcagacttgaaacactctttttgtggtatttgcaagtggagatttcagccgctttgagttcaatggtagaataggaaatatcttcctatagaaactagacagaatcattcccacaaactgcgttgtgatgtgttcgttcaactcacagagtttaacctttgttttcagagaggagttaggaaactgtctgtttgtaaattctgtaagtggatattctgaaatcttgtggccttcgttggaaacgggatttcttcatattctgctagacagaagaattctcagaatcttccttgtgttgtgtgtattcaactcacagagtttaacgatggtttacacagagcggatttgaaacactctttttgtggaatttgcaagtggagatttcagccgctttgaggtcaatggtagaaaaggaaatatcttcgtataaaaactagacagaatgattctcagaaacttctttgtgatgtgtgcgttcaactcacagagtttaacctttcttttcatagagcagttaggaaacactctgtttgtaaactctgcaagtggatattcagacctctttgaggccttctttggaaacgggatttcttcatactgtgctagacagaagaattctcagtaacttccttgtgttgtgtgtattcatctcacagagttgaacgatcctttacacagagcggacttgaaacactcttttgatggaatttgcaagtggagatttcagccgcgttgaggtcaatggtagaaaaggaaatatcttcgtataaaaactagacagaatgattctcagaaacttctttgtgatgtgtgcgttcaactcacagagtttaacctttcttttcatagagcagttaggaaacactctgtttgtaaactctgcaagtggatattcaaacctctttgaggccttcgttggaaacgggatttcttcatactatgctagacagaagaattcccagtaacttccttgtgttgtgtgtgttcaactcacagagttgaactttcatttacacagagcagatttgcaacactctttttgtggaatttgcaaatggagatttcaagcgctttgaggccaaagccagaaaaggaaatatcttcgtttcaaaactagacagaatcattctcagaaactactgcgtgatgtgtgcgttcaactctcagagtttaacttttcttttcattcagcggtttggaaacactctgtttgtaaagtctgcacgtggatattttgaccacttagaggccttcgttggaaacgggtttttttcatgtaaggctagacagaagaattctcagaaactcccttgtgtggtgtgtattcaactgacagggttgaactttcatttagacagagcagatttgaaaccctctttatgtggaattggcaagtggagatttcaagcgctttgagaccaaaggcagaaaaggaaatatcttcgtttcaaaactagacagaatcattcccacaaactgcgttgtgatgtgttcgttcaactcacagggtttaacctttcttttcatagagcagttaggaaacactctgtttgtaaagtctgtaaggggatattctgacatcttgtggccttcgttagaaacgggatttcttcatattctgctagacacaagaactctcagtaacttccttgtgttgtgtgtattcaactcacagagttgaacgatcctttacacagagcagacttgaaacattcttttcgtggaatttgcaactggagatttcagccgctttgaggtcaatggtagaataggaaatatcttcctatagaaactagacagaacgattctcagaaactcctttgtgatgtgtgcgttcaactcacagagtttaaactttcttttcatagagcagttaggaaacactctgtttgtaaagtctgcaagtggatattcagacctctttgaggccttcgttggaaacgggatttcttcatattctgctagacagaagaattctcagtaacttccttgtgttgtgtgtattcaactgacagagttgaactttcatttagagagagcagatttgaaacactgtttttgtggaatttgcaagtggagatttcaagcgctttgggaccaaaggcagaaaaggaaatatcttcgtataaaaactagacagaatcattctcagaaactgctctgcgatgtgtgcgttcaactctcagagtttaacttttcttttcattcagcagtttggaaacactctggttgtaaagtctgcacttggataacttgaccacttagaggacttcgttggaaacgggtttttttcctgtaaggctagacagaagaattcccagtaacttccttgtgttgtgtgcattcaactcacagacttgaacgttcccttagacagagcagatttgaaacactctatttgtgcaatttgcaagtgtagatttcaagcgctttatggtcaacggcagaaaaggaaatatcttcgtttcaaaactagacagaatgattctcagaaactcctttgtgatgtgtgcgttcaactcacagagtttaacctttcttttcatagagcagttaggaaacactctgtttgtaaagtgtgcaagtggatattcagacctccttgaggccttcgttggaaacgggatttcttcatattatgctagacagaagaattctcagtaagttccttgtgttgtgtgtattcaactcacagagttgaacgatcctttacacagagcagacttgaaacactctttttgtggaatttgcaagtggagatttcagccgctttgaggtcaatggtagaataggaaatatcttcctatagaaactagacagaatgattctcagaaactcctttgtgatgtgtgcgttcaactcacagagtttaacctttctttacatagagcagttaggaaacactcagtttgtaaagtctgcaagaggatattcagacatctttgaggctttcgttggaaacgggatttcttcatattctgctagagagaaagaattcccagtaacttccttgtgttgtgtgtgttcaactcacagagttgaactttcatttacacagagcagattggaaacactctttttgtggaatttgcaagtggagattgcaagcgctttgaggccaaaggcagaaaaggaaatatcttcgtataaaaactagacagaatcattctcagaaactgctctgcgatgtgtgcgttcaactctcagagtttaactttgcttttcattcagcagtttggaaacactctgtttgtaaagtctgcacgtggatattttgaccacttagaggccttcgttggaaacggttttctttcctgtaaggctagacagaagaattcccagtaacttccttgtgttgtgtacattcaactcacagagttgaacgttcccttagacagagcagatttgaaacactctttttgtgcaattggcaagtggagatttcaagcgctttaaggtcaatggcagaaaaggaaatatcttcgtttcaaaactagacagaatcattcccacaaactgcgttgtgatgtgttcgttcaactcacagagtttaacctttctgttcatagagcagttaggaaacactctgtttgtaaagtctgtaagtggatattctgacatcttgtggcctttgttggaaacgggatttcttcatattctgctagacagaagaattctcagtaacttccttgtgttgtgtgtattcaactcatagagttgaacgatcccttacacagagcagacttgtaacactctttttgtggaatttgcaagtggagatttcacccgctttgacgtcaaaggtagaaaaggaaatatcttcctataaaaactagacagaatgattctcagaaactcctttgtgatgtgtgcgttcaactcacagagtttaacttttcttttcatagagcagttaggaaacactctgtttataaagtctgcaagtggatattcagacctctttgaggccttcgttggaaacgggatttcttcatattatgctagacagaagaattcccagtaacttccttgtgttgtgtgtgttcaactcacagagtttaactttcatttacccagagcagatttgaaacactctttttgtggaatttgcaagtggagatttcaagcgctttgaggccaaaggcagaaaaggaaatatcttcgtttcaaaactagacagaatcattctcagaaactgctgcgtgatgtgtgcgttcaactctcagagtttaacttttcttttcattcagcggtttggaaacactctgtttgtaaagtctgcacgtggaaattttgaccacttagaggccttcgttggaaacgggtttttttcatgtaaggccagacagaagaattcccagtaacttccttgtgttgtgtacattcaactcacagagttgaacgttcccttagacagagcagatttgaaacactctttttgtgcaattggcaagtggagatttcaagcgctttaaggtcaaagcagaaaaggaaatatcttcgtttcaaaactagacagaatcattcccacaaactgcgttgtgatgtgttcgttcaactcacagagtttaacctttcttttcatagagcagttaggaaacagtctgtttgtcaattctgtaagtggatattctgacatcttgtggccttcgttggaaaagggatttcttcatattctgctagacagaagaattctcagtaacttccttgtgttgtgggtattcaactcacagagttgaacgatcctttacacagagcagacttggaacactctttttgtggaatttgcaagtggagatttcagccgcgttgaggtcaatggtagaaaaggaaatatcttcgtataaaaactagacagaatgattgtcagaaactccttggtgctgtgtgcgttcaactcacagagtttaaagtttcttttcatagagcagttaggaaacactctgtttgtaatgtctgcaggtggatattcagacatcattgaggctttttttggaaacgggatttcttcatattctgctatatagaagaattctcagtaacttccttgtgttgtgtgtattcaactcacagagttgaacgatcctttacacagagcagacttgaaacactctttttgtggaatttgcaagtggagatttcagccgctttgaggtctatagtagaaaaggaaatatcttcgtagaaaaactagacagaatgattctcagaaactcctttgtgatgtgtgcgttcaactcacagagtttaacctttcttttcatagagcagttaggaaacactctgtttgtaaagtctgcaggtagatattcagacatctttgaggctttcgttggaaacgggatttcttcatattctgctagacagaagaattcccagtaaattccttgtgttgtgtgtgttcaactcacagagttgaactttcatttacacagagcagatttgaaacactctttttgtggaatttgcaagtggagatttcaagcgctttgaggccaaaggcagaaaaggaaatatcttcgtttcaaaactagacagaatcattctcagaaactgctgcgtgatgtgtgcgttcaactctcagagtttaacttttcttttcattcagcggtttggaaacactctgtttgtaaagtctgcacgtggaaattttgaccacttagaggccttcgttggaaacgggtttttttcatgtaaggcttgacagaagaattcccagtaacttccttgtgttgtgtgcattcaactcacagagttgaacgttcccttagacagagcagatttgaaacactctatttgtgcaatttgcaagtgtagatttcaagcgctttaaggtcaacggcagaaaaggaaatatcttcgtttcaaaactagacagaatgattctcagaaacttcattgtgatgtgtgcgttcaactcacagagtttaacctttcttttcatagagcagttgggaaacagtctgtttgtaaattctgtaagtggatattctgacatcttgtggccttcgttggaaacgggatttcttcatattctgctagacagaagaattctcagtaacttccttgtgttgtgtgtattcaactcacagagttgaaagatcctttacacagagcagacttgaaacactctttttgtggaatttgcaagtggagatttcagccgctttgaggtcaatggtagaaaaggaaatatcttcgtataaaaactagacagaatgattctcagaaactcctttgtgatgtgtgcgttcaactcacagagttcaacctttcttttcatagagcagttgggaaacactctgtttgtaaagtctgcaagtggatattcagacctctttgaggccttcgttggaagcgggatttcttcatattctgctagacagaagaattcccaataacttccttgtgttgtgtgtgttcaactcacagagttgaactttcatttacacagagcagattggaaacactctttttgtggaatttgcaagtggagatttcaagtgctttgaggccaaaggcagaaaaggaaatatcttcttataaaaactagacagaatcattctcagaaactgctgcatgatgtgtgcgatcaactctcagagtttaacttttcttttcattcagcggtttggaaacactctgtttgtaaagtctgcacgtggaaattttgacaacttagagaccttcgttggaaacgggattttttcatgtaaggctagacagaagaattctcagtaacttccttgtgttgtgtttattcaactcacagagttgaatgatcctttacacagagcagacttgaaacactctttttgtggaatttgcaagtggagatttcagccgctttgaggtcaatggtagaataggaaatatcttactatagaaactagacagaatgattctcagaaactcctttgtgatgtgtgcattcaactcacagagtttaacctttcttttcatagagcagttaggaaacactctgtttgtaaagtctgcaagtggatattcagacctctttgaggccttcgttggaaacgggttttcttcatattctgctagacagaagaattctcagtaacttccttgtgttgtgtgtattcaactcacagagttgaacgatcctttacacagagcagagttgtaacactctttttgtggaatttgcaagtggagaattcagccgctttgaagtcaaaggtagaaaaggaaatatcttcctataaaaactagacagaatgattctcagaaactcctttgtgatgtgtgcgttcaactcacagagtttaacctttcttttcatagagcagttaggaaacactctgttggtaaagtctgcaagtggatattcagacctccttgaggccttcgttggaaacgggatttcttcatattatgctagacagaactattctcagtaacttccttgtgttgtgtgtattcaactgacagagttgaaatttcatttagagagagcagatttgaaacactgtttttgtggaatttgcaagtggagatttcaagcgctttggggccaaaggcagaaaaggaaatatcttcgtataaaaactagacagaataattctcagaaactgctgcgtgatgcgtgcgttcaactctcagagtttaacttttcttttcattcagcggtttggaaacactctgtttgtaaagtctgcaagtggatattcagacctctttgaggccttcgttggaaacgggatttcttcctattatgctagacagaagaattcccaataacttccttgtgttgtgtacattcaactcacagagttgaacgttcccttagacagagcagatttgaaacactctttttgtgcaattggcaagcggagatttcaagcgctttaaggtcaatggcagaaaaggaaatatcttcgtttcaaaactagacagaatcattcccacaaactgcgttgtgatgtgttcgttcaactcacagagtttaacctttcttttcatagagcagttaggaaacagtctgtttgtcaattctgtaagtggatattctgacatcttgtggccttcgatggaaacgggatttcttcatattctgctagacagaagaattctcagtaacttccttgtgttgtgtgtattcaactcacagagtggaacgatcctttacacagagcagacttgagacactctttttgtggaatttgcaagtggagatttcagccgctttgaggtcaatagtggaaaaggaaatatcttcatagaaaaactagacagaatgattctcagaaactcctttgtgatgtgtgcgttcaacacacagagttaaacttttcttttcatagagcagttaggaaacactctgtttgtaaagtctgcaagtggatattcagacctctttgaggccttcgttggaaacaagatttcttcatattatgctagacagaagaattctcagtaacttccttgtgttgtgtgtattcaactgacagagttgaactttcatttagagagagcagatttgaaacactgtttttgtggaatttgcaagtggagatttcaagcgctttcgggccaaaggcagaaaaggaaatatcttcgtataaaaactagacagaatcattctcagaaactgctgcgtgatgtgtgcgttcaactctcagtgtttaacttttcttttcattcagcggtttggaaacactctgtttgtaaagtctgcacgtggatattttgaccacttagaggccttcgttggaaacgggtttatttcatgtaaggctagacagaagaattcccagtaacttctttgtgttgtgtgcattcaactcacacagttgaacgttcccttagacagagcagatttgaaacactctatttgtgcaatttgcaagtgtagatttcaagcgctttaaggtcaatggcagaaaaggaaatatcttcgtttcaaaactagacagaatcattcccacaaactgcgttgtgatgtgtttgttcaactcacagagtttaacctttcttttcatagagcagttaggaaacagtctgtttgttaattctgtaagtggatattctgacatcttgtggccttcgttggaaacgggatttcttcatattctgctagacagaagaattctcagaaacttccttgtgttgtgtgttttcaactcacagagttgaacgatcctttacacagagtagacttgaaacactctttttgtgtaatttgcaagtggagatttcagccgctttgaggtcaatggtagaaaaggaaatatcttcgtataaaaactagacagagtgattctcagaaactcctttgtgatgtctgcgttcaactcacagagttgaacctttcttttcatagagcagttaggaaacactctgtttgtaaagtctgcaagtggatattcagacatctttgaggccttcgttggaaacgggatttcttcatataatgctagagagaagaattctcagtaacttaccttgtgttgtgtgtattcaactgacagagttgaactttcatttagagagagcagatttgaaacactgtttttgtggaatttgcaagtggagatttcaagcactttggggccaaaggcagaaaaggaaatatcttcgtataaaaactagacagaatcattctcagaaactgctctgcgatgtgtgcgttcaactctcagagtttaacttttcttttcattcagcagtttggaaacactctgtttgtaaagtctgcacgtgcataatttgaccacttagaggccttcgttggaaacgggtttttttcatgtaaggctagacagaagaattctcagtaacttccttgtgttgtgtgtattcaactcacagagttgaacgatcctttacacagagcagacttgaaacgctcgttttgtggaatttgcaagtggagatttcagccgctttgaggtcaatggtagaaaaggaaatatcttcgtataaaaactagacagaatgattctcagaaactcctttgtgatgtgtgcgttcaactcacagagtttaccctttcttttcatagagcagttaggaaacactctgtttgtaaagtctgcaagtggatattcagacatccttgaggctttcgttggaaacgggatttcttcatattctgctagacagaagaattctcagtaacttccttgtgttgtgtgtattcaactcacagagttgaacgatcctttacacagagcggagttgaaacactctttttgtggaatttgcaagtggagatttcagccgctttgaggtcaatggtagaaaaggaaatatcttcttatacagactatacagaatgattctcagaaactcctttgtgatgtgtgcgttcaactcacagagtttaacctttctgttcatagagcagttaggaaacactctgtttgtaaagtctgcaagtggatattcagacctccttgaggccttcgttggaaacgggatttcttcctattctgctagacagaagaattctcagtaacttccttgtgttgtgtgtattcaactcacagagttgaacgatcctttacacagagcagacttgaaacactctttttgtggaatttgcaagtggagatttcagccgcgttgaggtcaatagtagaaaaggaaatatcttcgtagaaaaactagacagaatgattctcagaaactgctctgcgatgtgtgcgttcaactctcagagtttaacttttcttttcattcagcagtttggaaacactctgtttgtaaagtctgcacgtggatattttgaccacttagaggccttcgttggaaacgggttttttttcctgtaaggctagacagaagaattcccagtaacttgcttgtgttgtgtacattcaactcacagagttgaacgttcccttagacagagcagatttgaaacactctttttgtgcaattggcaagtggagatttcaagcgctttaaggtcaatggcagaaaaggaaatatgttcgtttcaaaactagacagaatcattcccacaaactgcgttgtgatgtgttcgttcacctcacagagtttaacctttctgttcatagagcagttaggaaacactctgtttgtaaagtctgcaagtggatattcagacctctttgaggccttcgttggaaacgggatttcttcatattctgctagacagaagaattctcagtaacttccttgtgttgtgtgtattcaactcacagagttgaacgatcctttacacagagcagacttgaaacactctttttgtggaatttgcaattggagatttcagccgctttgaggtcaatagtagaaaaggaaatatcgtcgtagaaaaactagacagaatgattctcagaaactcctttgtgatgtgtgtgttcaactcacagagtttaacctttcttttcatagagcagttaggaatcactctgtttgtaaagtctgcaagtggatattcagacctgtttgaggccttcgttggaaacgggtttttttcatataaggctagacagaagaattctcagtaacttccttgtgttgtgtgtattcaactgacagaattgaactttcatttagagagagcagatttgaaacactgtttttgtggaatttgcaagtggagatttcaagcgctttggggccaaaggcagaaaaggaaatatcttcgtataaaaagtagacagaatgattctcagaaactcctttgtgatgtgtacgttcaacacacagagtataacttttcttttcatagagcagttaggaaacactctgtttgtaaagtctgcaagtggatattcagacctcctttgaggccttcgttggaaacgggatttcttcatattatgctagacagaagaattcccagtaacttccttgtgttgtgtacattcaactcacagagttgaacgttcccttagacagagcagatttgaaacactctttttgtgcaattggcaagtggagatttcaagcgctttaaggtcaatggcagaaaaggaaatatcttcgtttcaaaactagacagaatgattctcagaaactcctttgtgatgtgtgccgttcaactcagagagtttaacctttcttttcatagagcagttaggaaacacgctgtttataaagtctgcaagtggatattcagacccctttgaggccttcgttggaaacgggatttcttcatattatgctagacagaagaattctcagtaacttccttgtgttgtgtgtattcaactcacagagttgaacgatcctttacacaggagcagacttgaaacactctttttgtggaatttgcaagtggagatttcagccgctttgaggtcaatggtagaataggaaatatcttcctatagaaaatagacagaatgattctcagaaactcctttgtgatgtgtgcgttcaactcacagagtttaacctttcttttcatagagcagttaggaaacactctgtttgtaaagtctgcaagtggatgttcagacctctttgaggccttcgttggaaacgggtttttttcatataaggctagacagaagaattcccactaacatccttgtgttgtgtgtgttcaactcacagagttgaactttcatttacacagagcagatttgaaagactctttttgtggaatttgcaaatggagatttcaagcgctttgaggccaaagacagaaaaggaaatatcttcgtttcaaaactagacagaatcattctcagaaactgctgcgtgatgtgtgcgttcaactctcagagtttaacttttcttttcattcagcggtttggaaacactctgtttgtaaaaactgcacgtggatattttgaccacttagaggccttcgttggaaacgggttttttttcatgtaaggctagacagaagaattcccagtaacttccttgtgttgtgtgcattcaactcacagagttgaacgttcccttagacagagcagatttgaaacactctatttgcgcaatttgcaagtgtagatttcaagcgctttcaggtcaatggcagaaaaggaaatatcttcgtttcaaaactagacagaatgattctcagaaactcctttgtgatgtgtgtgttcaactcacagagtttaacctttcttttcatagagcagttaggaaacactctgtttgtaaagtctgcaagtggatattcagacctcgttgaggccttcgttggaaactggatttcttcatattctgctagacagaagaattctcacaatcttccttgtgttgtgtgtattcaactcacagagttgaacgatggtttacacagagcagatttgaaacactctttttgtggaatttgcaagtggagatttcagccgctttgaggtcaatggtagaaaaggaaatatcttcatataaaaactagacagaatgattctcataaactcctttgtgatgtgtgcgttcaactcacagagtttaacttttcttttcatagagcagttaggaaacactctgtttgtaaagtctgcaagtggatattcagacctctttgaggccttcgttggaaacgggatttcttcatattatgctacacagaagaattttcagtaacttccttgtgttgtgtgtattcaactcacagagttgaactttcatttagagagagcagatttgaaacactgtttttgtggaatttgcaagtggagatttcaagcgctttggggccaaaggcagaaaaggaaatatcttcgtataaaaactagacagaatcattctcagaaactgctgcgtgatgtgtgcgttcaactctcagagtttaacttttcttttcattcagcggtttggaaacactctgtaaagtctgcacgtggatattttgaccacttagaggccttcgttggaaacggtttttttttatgtaaggctagacagaagaattcccagtaacttccttgtgttgtgtgcattcaactcacagagttgaacgttcccttagacagagcagatttgaaacactctatttgtgcaatttgcaagtgtagttttcaagctctttaaggtcaacggcagaaaaggaaatatcttcgtttcaaaactagacagaatcattcccacaaactgcgttgtgatgtgttcgttcaactcacagagtttaacctttctgttcatagagcagttaggaaacactctgtttgtaaagtctgtaagtggatattctgacatcttgtggccttcgtgggaatcgggatttcttcatattctgttagacagaagaattctcagaatcttccttgtgttgtgtgtattcaactcacagagttgaacgatggtttacacgagcagatttgaaacactctttttgtggaatttgcaagtggagatttcagccgctttgaggtcaatggtagaaaaggaaatatcttcgtataaaaactagacagaatgattctcagaaacttcattgtgatgtgtgcgttcaactcacagagtttaacctttcttttcatagagcggttaggaaacactctgtttgtaaactctgcaagtggatattcagacctctttgaggccttcgttggaaacgggatttcttcatactgtgctagacagaagaattctcagtaacttccttgtgttgtgtgtattcaactgacagagttgaactttcatttagagagagcagatttgaaacactgtttttgtggaatttgcaaatggagatttcaagcgctttggggccaaaggcagaaaagaaatatcttcgtataaaaactagacagaatcattctcagaaactgctctacgatgtgtgcgttcaactctcagagtttaacttttcttttcattcagcagtttggaaacactctgtttgtaaagtctgcacgtggataatttgaccacttagaggccttcgttggaaacgggtttttttcatgtaaggctagacagaagaattctcagtaacttccttgtgttgtgtgtattcaactcacacagttgaacgatcctttacacagagcagacttgtaacactctttttgtggaatttgcaagtggagatttcagccgctttgaagtcaaaggtagaaaaggaaatatcttcctattaaaactagacagaatgattctcagaaactcctttgtgatgtgtgcgttcaactcacagagtttaacctttcttttcatagagcagttaggaaacactctgtttgtaaagtctgcaagtggatattcagacatccttgaggccttcgctggaaaagggatttcttcatattatgctggacagaagaattctcagtaacttccttgtgttgtgtttattcaactcacagagttgaatgatcctttacaaagagcagacttgaaacactctttttgtggaatttgcaagtggagatttcagccgctttgaggtcaacggtagaaaagtaaatatcttcgtataaagactagacagaatgattctcagaaacttcattgtgatgtgtgcagttcaactcacagagtttaacctttcttttcatagagcagttaggaaacactctgtttgtgaactctgcaagtggatattcagacgtctttgaggccttcgttggaaatgggatttcttcatactgtgctagacagaagaattctcagtaacttccttgtgttgtgtgtattcaactgacagagttgaactttcatttggagagagcagatttgaaacactgtttttgtggaatttgcaagtggagatttcaagcgctttgcggccaaaggctgaaaaggaaatatcctcgtataaaaacaagacagaatcattctcagaaactgctctgcgatgtgtgcgttcaactctcagagtttaacttttcttttcattcagcagtttggaaacactctgtttgtaaagtctgcacgtggatattttgaccacttagaggccttcgttggagacgggtttttttcctgtaaggctagacagaagaattcccagtaacttccttgtgttgtgtacattcaactcacagagttgaacgttcccttagacagagcagatttgaaacacactttttgtgcaattggcaagtggagatttcaagcgctttaaggtcaatggcagaaaagcaaatatcttcgtttcaaaactagacagaatcattcccacaaactgcgttgtgatgtgttcgttcaactcacagagtttaacctttctgttcatagagcagttaggaaacactctgtttgtaaagtctgcaagtggatattctgacatcttgtggccttcgttggaaacgggatttcttcatattctgctagacagaagaattctcagtaacttccttgtgttgtgtgtattcaactcacagagttgaacgatcctttacacagagcagacttgtaacactctttttgtagaatttggaagtggagatttcagccgctttgaagtcaaaggtagaaaaggaaatatcttcctataaaaactagacagaatgattctcagaaattcctttctgatgtgtgcgttcaactcacagagttcaacctttcttttcatagagcagttgggaaacactctgtttgtaaagtctgcaagtggatattcagacttctttgaggccttcgttggaagcgggatttcttcatgttctgcttgacagaagaattcccagtaacttccttgtgttgtgtgtgttcaactcacagagttgaactttcatttacacagagcagatttgaaacactctttttgtggaatttgcaggtggagatttcaagcgctttgaggccaaaggcagaaaaggaaatatcttcctataaaaactagacagaatgattctcagaaactcctttgtgatgtgggcgttcaactcacagagtttaacctttcttttcatagagcagttaggaaacactctgtttgtaacgtctgcacgtggatatttggacttctttgaggtcttcgttggaaacgggtttttttcatgtaaggctagacagaagaattcccagtaacttccttgtgttgtgtgcattcaactcacagaattgaacgttcccttagacagagcagattttaaacactctatttgtgcaatttgcaagtgtagatttcaagcgctttaaggtcaacggcagaaaagaaaatatcttcgtttcaaaactagacagaatcattcccacaaactgcgttgtgatgtgctcgttcaactcacagagtttaacctttcttttcatagagcagttaggaaacactctgtttgtaaagtctgtaagtggatattctgacatcttgtggccttcgttggaaacgggatttcttcatattatgctagacagaagaattctcagaatcttccttgtgttgtgtgtattcaactcacacagttgaacgattgtttacacagagcagatttgaaacactctttctgtggaatttgcaagtggagatttcagccgctttgaggtccatggtagaaaaggaaatatcttcgtataacaactagacagaatgattctgagaaactcctttgtcatgtgtgcgttcaactcacatagtttaacctttcttttcatagagcagttaggaaacactctgtttgtaaagtctgcaagtggatattcagacctccttgaggcattcgttggaaacgggatttcttcatattatgctagacagaagaattcccagtaacttccttgtgttgtgtgtgttcaactcacagagttgaactttcatgtacacagagcagatttgaaacactcttttcgtggaatttgcaaatggagatttcaagcgctttgaggccaaaggcagaaaaggaaatatcttcgtataaaaactagacagaatcattctcagaaactgctgcgtgatgtgtgcgttcaactctcagagtttaacttttcttttcattcagcggtttggaaacactctgtttgtaaagtctgcacgtggatattttgaccacttagaggccttcattggaaacgggtttttttcatgtaaggctagacagaagaattcccagtaacttccttgtgttgtgtgcattcaactcacagagttgaacgttcccttagacagagcagatttgaaacactctatttgtgcaatttgcaagtgtagatttcaagcgctttaaggtcaatggcagaaaaggaaatatcttcgtttcaaaactacacagaacgattgtcagaaactcctttatgatgtgtgcgttcaactcacagagtttaacctttcttttcatagagcagttaggaaacactctgtttgtaaattctgcaagtggataatgagacctctttgaggccttcgttggaaacgggatttcttcatattctgctagacagaagaattctcagtaacttcctcgtgttgtgtgtattcaactcacagagttgaacgatcctttacacagagcagacttgaaacactctttttgtggaatttgcatatggagatttcagccgctttgaggtcaatggttgaaaaggaaatatcttcatataaaaattagacagaatgattctcagaaactcctttgtgatgtgtgcgttcaactcacagagtttaacctttcttttcatagagcagttaggaaacactctgtttgtaaaggctgcacgtggatatttggacttctttgaggccttcattggaaacgggtttttttcatgtaaggctagacagaagaattctcagtaacttccttgtgttgtgtgtattcaactgacagagttgaactttcatttatagagagcagatttgaaacactgtttttgtggaatttgcaagtggagatttcaagcgctgtggggccaaaggcagaaaaggaaatatcttcgtataaaaacaagacagaatcattctcagaaactgctctgtgatgtgtgcgttcaactctcagagtttaacttttcttttcattcagcagtttggaaacactctgtttgtaaagtctgcacgtggatattttgaacacttcgaggccttcgttggaaacgggtttttttcatgtaaggctagacagaagaattcccagtaacttccttgtgttgtgtgcattcaactcacagagttgaacgttcccttagacagagcagatttgaaacactctatttgtccaatttgcaagtgtagatttcaagcgctttaaggtcaacggcagaaaaggaaatatcttcgtttcaaaactagacagaatgattctcagaaactcctttgtgatgtgtgcattcaactcacagagtttaacctttcttttcatagagcagttaggaaacactctgtttgtaaagtctgcaagtggatattcagacctccttgaggcctacgttggaaacgggatttcttcatattatgctagacagaagaattctcagtaacttccttgtgttgtgtgtattcaactcacagagttgaacgatcctttacacagagcagacttgaaacactctttttgtggaatttgcaagtggagatttcagccgatttgaggtcaatggtagaataggaaatatcttcctttagaaactagacagaatgattctcagaatcttctttgtgatgtgtgcgttcaactcacagagtttaacctttcttttcatagagcaggtaggaaacactctgtttgtaaactctgcaagtggatattcagacctcattgaggccttcgttggaaacgggatttcttcatactatgctagacagaagaattcccagtaacttccttgtgttgtgtgtgttcaactcacagagttgagctttcatttacacagagcagatttgaaacactctttttgtggaatttgcaagtggagatttcaagcgctttgaggccaaaggcagaaaaggaaatatcttcgtataaaaactagacagaatcattctcagaaactgctgcgtgatgtgtgcgttcaactctcagagtttaacttttgttttcattcagcggtttggaaacactctgtttgtaaagtctgcacgtggatattttgaccacttagaggccttcgttggaaacgggttttttttcatgtaaggctacacagaagaattcccattaacttccttgtgttgtgtgcattcaactcacagagttgaacgttcccttagacagagcagatttgaaacactctatttgtgcaatttgcaagtgtagatttcaagcgctttaaggtcaacggcagaaaaggaaatatcttcgtttcaaaactagacagaatgattatcataaactcctttgtgatgtgtgccttcaactcacagagtttaacctttcttttcatagagcagttaggaaacactctgtttgtaaagtctgcaagtggatattcagacctccttgaggccttcgttggaaacgggatttcttcatattctgctagacagaagaattctcagtaacttccttgtgttgtgtgtattcaactcacagagttgaacgatcctttacacagagcagacttgaaacactctttttgtggaatttgcaagtggagatttcagccgctttgaggtcaatggtagaaaaggaaactatcttcgtataaagactagacagaacgattctcagaaactcctttgtgatgtgtgcgttcaactcacagagtttaacctttcttttcatagagcagttaggaaacactctgtttgtaaagtctgcaagtggatattcagacctccttgaggccttcgttggaaacgggatttcttcatattctgctagacagaagaattctcagtaacttccttgtgttgtgtgtatgcaactcacagagttgaacgatcctttacacagagcagacttgaaacactctttttgtggaatttgcaagtggagatttcagccgctttgaggtcaatagtagaaaaggaaatatcttcgtagaaaaactacacagaatcattctcagaaactgctgtgtgatgtgtgcgttcaactctcagagtttaacttttcttttcattcagcggtttggaaacactctgtttgtaaagtctgcacgtggatattttgaccacttagaggccttcgttggaaacgggtttttttcatgtaaggctagacagaagaattctcagtaacttccttgtgttgtgtgtattcaactcacagagttgaacgatcctttacacagagcagacttgaaacactctttttgtggaatttgcaagtggagatttcagccgctttgaggtcaatggtagaaaagaaaatatcttcgtagaaaaactagacagaatgattctcagaaactcctttgtgatgtgtgtgttcaactcacagagtttaacctttcttttcatacagcagttagtaaacactctgtttataaagtctgcatgtggatattcagaaccctttgaggccttcgttggaaacgggatttcttcatattatgctagacagaagaattctcagtaacttccttgtgttgtgtgtattcaactcacagaagttgaacgatcctttacacagagcagacttgaaacattctttttgtggaatttgcaagtggagatttcagccgcttagaggtcaatggtagaataggaaatatcttcctatagaaactagacagaatgattctcagaaactcctttgtgatgtgtgcgttcaactcacagagtttaacctttctgttcatagagcagttaggaaacactctgtttgtaaagtctgcaagtggatattcagacctccttgaggccttctttggaaacgggatttcttcatattctgctagacagaagaattcccagtaacttccttgtgttgtgtgtgttcaactcacagagttgaactttcatttacacagagcagatttgaaacactctttttgtggaatttgaaagtggagatttcaagcgctttgaggccaaaggcagaaaaggaaatatcttcgtataaaaactagacagaatgattctcagaaactgctctgcgatgtgtgcgttcaactctcagagtttaacttttcttttcattcagcagtttggaaacactctgtttgtaaagtctgcacgtggatattttgaccacttagaggccttcgttggaaacgggtttttttcctttaaggctagacagaagaattcccagtaacttccttgtgttgtgtacattcaactcacagagttgaacgttccctcagacagagcagatttgaaacactctttttgtgcaattggcaagtggtgatttcagccgctttgaggtcaatggtagaaaaggaaatatcttcgtataaaaactagacagaatgattctaagaaaatattttgtgatgtgtgcgttcaactcacagagtttaacttttcttctcatagagcagttaggaaacactctgtttgtaaagtgtgcaagtggatattcagacctctttgaggccttcgttggaaaagggatttcttcatattatgctagacagaataattctcagtaacttgccttgtgttgtgtgtattcaactcacagagttgaaagaccctttacagagagcaggcttgaaacactctttttgtcgaatttgcaagtggagatttcagccgctttgaggtcaatggtagaataggaaatatcttcttatagaaactagacagaatcattctcagaaactcctttgtgatgtgtgtgttcaactcacagagtttaacctttcttttcatagagcagttagtaaacactctgtttataaagtctgcaagtggatattcagacccctttgaggccttcgttggaaacggggatttcttcatattatgctagacagaagaattctcagtaacttccttgtgttgtgtgtattcaactgacagagttgaactttcatttagagagagcagatttgaaacactgtttttgtggaatttgcaagaggagatttcaagcgctttggggccaaaggcagaaaaggaaatatcttcgtataaaaactagacagaatcattctcagaaactgctgcgtgatgtgtgcgttcaactctcagagtttaacttttcttttcattcagcggtttggaaacactctgtttgtaaagactgcacgtggatattttgaccacttagaggccttcgttggaaaggggttttttttcatgtaaggctagacagaagaattcccagtaacttccttgtgttgtgtgcattcaactcacagagttgaacgttcccttagacagagcagatttgaaacactctatttgtgcaatttgcaagtgtagatttcaagcgctttaaggtcaatggcagaaaaggaaatatcttcgtttgaaaactagacagaatgattctcagaaactcctttgtgatgtgtgcgctcaactcacagagtttaacctttcttttcatagagcagttaggaaacactctgtttgtaaagtctgtaagtggatattctgacatcttgtggccttcgttggaaacgggatttcttcatattctgctagacagaagaattctcagtaacttccttgtgttgtgtgtattgaactcacagagttgaacgatcctttacacagagcagacttgaaacactctttttgtggaatttgcaagtggagatttcagccgctttgaggtcaacagtagaaaaggaaatatcttcgtagaaaaactagacagattgattctcataaactcctttgtgatgtgtgcgttcaactcacagagtttaacctttcttttcatagagcagttaggaaacactctgtttgtaaagtctgcaagtggatattcagacctctttgaggccttcgttggaaacgggatttcttcatattctgctagacagaagaattcccagtaacttccttgtgttgtgtgtgttcaactcacagagttgaactttcatttacacagagcagatttgaaacactctttttgtggaatttgcaaatggagatttcaagcactttgaggccaaaggcagaaaaggaaatgtcttcgtttcaaaactagacagaatcattctcagaaactgctgcgtgatgtgtgcgttcaactctcagagtttaacttttcttttcattcagcggtttggaaacactctgtttgtaaagtctgcacgtggatattttgaccacttagaggtcttcgttggaaacgggttttttttaatgtaaggctagacagaagaattcccagtaacttccttgtgttgtgtgtattcaactcacagagttgaacgttcccttagacagagcagatttgaaacactctatttgtgcaatttgcaagtgtagatttcaagcgctttaaggtcaatggcagaaaaggaaatatcttcgtttgaaaactagacagaatcattcccacaaactgcgttgtgatgtgttcgttcaactcacagagtttaacctttcttttcatagagcagttaggaaacagtctgtttgtcaattctgtaagtggatattctgacatcttgtggccttagttggaaacgggatttcttcatattctgctagacagaagtattctctttaacttccttgtgttgtgtgtattcaactcacagagttgaacgatcctttacacagagcagacttgaaacactctttttgtggaatttgcaagtggagatttcagccgctttgaggtcaatgttagaataggaaatatcttcctatagaaactagacagaatgattctcagaaactcctttgtgatgtgtgcgttcaactcacagagtttaacctttcttttcatagagcagttaggaaacactctgtttgtaaagtctgcaagtggatattcagacctctttgaggccttcgctggaaacgggtttttttcatataaggctagacagaagaattcccagtaacttccttgtgttgtgtgtgttcaactcacagagttgaactttcatttacacagagcagatttgaaacactctttttgtggaatttgcaggtggagatttcaagcgctttgaggccaaaggcagaaaaggaaatatcttcgtttcaaaactagacagaatcattctcagaaactgctgcgtgatgtgtgcgttcaactgtcagagtttaacttttcttttcattcagcggtttggaaacactctgcaaagtctgcacgtggatattttgaccacttagaggccttcgttggaaacgggttttttttatgtaaggctagaccgaagaattccccgtaacttccttgtgttgtgtgcattcaactcacagagttgaacgttcccttagacagagcagatttgaaacactctatttgtgcaatttgcaagtgtagttttcaagctctttaaggtcaacggcagaaaaggaaatatcttcgtttcaaaactagacagaatcattcccacaaactgcgttgtgatgtgttcgttcaactcacagagtttaacctttcttttcatagagcagttaggaaacagtctgtttgtcaattctgtaagtggatattctgacatcttgtggccttagttggaaacgggatttcttcatattctgctagacagaagaattcccagtaatttccttgtgttgtgtggattcaactcacagagttgaacgatactttaaacagagcagattagaaacactctttttgtggaatttgcaagtggagatttcagccgctttgaggtcaatggtagaaaagggaatatcttcgtataaaaactagacagaatgattctcagaaactcctttgtaatgtgtgtgttcaactcacagagtttaacctttctgttcatagagcagttaggaaacactctgtttgtaaagtctgcaagtggatattcagacctctttgaggccttcgttggaaacgggatttcttcatattctgctagacagaagaattctcagaaacttccttgtgttgtgtgttttcaactcacagagttgaacgatgctttacacagagtagacttgaaacactctttttgtgtaatttgcaagtggagatttcagccgctttgaggtcaatggtagaaaaggaaatatcttcgtataaaaactagacagaatgattctcagaaactcctttgtgatgtgtgcgttcaactcacagagtttatcctttcttttcatagagcagttaggaaacactctgtttgtaaagtctgcaagagaatattcagacatctttgagactttcgttggaaacgggatttcatcatattctgctagacagaagaattctcagtaacttccttgtgttgtgtgtattcaactgacagagttgaactttcatttagagagagcagatttgaaacactgtttttgtggaatttgcaagtggagatttcaaacgctttggggccaaaggcagaaaaggaaatatcttcgtataaaaactagacagactcattctcagaaactgctctgcgatgtgtgcgttcaactctcagagtttaacttttcttttcattcagcagtttggaaacactctgtttgtaaaatctgcacgtggatattttgaccacttagaggccttcgttggaaacgggtttctttcctgtaaggctagacagaagaattcccagtaacttccttgtgttgtgtacattcaactcacagagttgaacgttcccttagacagagcagatttgaaacactctttttgtgcaattggcaagtggagatttcaagcgctttaaggtcaatggcagaaaaggaaatatcttcgtttcaaaactagacagaatcattcccaaaaactgcgttgtgatgtgttcgttcatctcacagagtttaacctttcttttcatagagcagttaggaaacagtctgtttgtaaattctgtaagtggatattctgacatcttgtggccttcgttggaaacgggatttcttcatattctgctagacagaagaattctcagtaactgccttgtgttgtgtgtattcaactcacagagttgaacgatcctttacacagaacagacttgaaacactctttttgtggaatttgcaagtggagatttcagccgctttgaggtcaatggtagaataggaaatatcttcctgtagaaactagacagaatgattctcagaaactcctttgtgatgtgtgcgttgaactcacagagtttaacctttcttttcatagagcagttaggaaacactctgtttgtaaagtctgcaagtggatattcagacctccttgagaccttcgttggaaacgggatttcttcatattatgctagacagaagaattctcagtaacttccttgtgttgtgtgtattcaactgacagagttgaactttcatttagagagagcagatttgaaacactctttttgtggaatttgcaagtggagatttcaagcgctttgtggccaaaggcagaaaacgaaatatcttcgtataaaaactagacagaatcattctcagaaactgctgagtgatgtgtgcgttcaactctcagagtttaacttttcttttcattcagcggtttggaaacactctgtttgtaaagtctgcacgtggacattttgaccacttagaggccttcgttggaaacgggtttttttcatgtaaggctagacagaagaattcccagtaacttccttgtgttgtgtgcattcaactcacagagttggacgttcccttagaaagagcagatttgaaacactctatttgtgcaatttgcaagtgtagatttcaagctctttaaggtcaatggcagaaaaggaaatatcttcgtttcaaaactagacagaatcattcccacaaactgcgttgtgaggtgttcgttcaactaacagagtttaacctttctgttcataaagcagttaggaaatactctgtttgtaaagtctgaaagtggatattctgacatcttgtggccttcgttggaaacgggatttcttcatattctgctagacagaagaattctcagaaacttccttgtgttgtgtgtattcaactcacacagttgaacgatggtttacacagagcagatttgaaacactctttttgtggaatttgcaagtggagatttcagccgctttgaggtcaatggtagaaaaggaaatatcttcgtataaaaactagacagaatgattctcagaaactcctttgtgatgtgtgcgttcaactcacagagtttaacctttctgttcatagagccgttaggaaacactctgtttgtaaagtctgcaagtggatattcagacctctttgaggccttcgttggaaacgggatttcttcatattctgctagacagaagaattcccagtaacttccttgtgttgtgtgtgttcaactcacagagttgaactttcatttacacagagcagatttgaaacactctttttgtggaatttgcaagtggagatttcaagcgctttgaggccaaagcagaaaaggaaatatcttcgtataaaaactagacagaatcattcttagaaactgctctgcgatgtgtgcgttcaactctcagagtttaacttttcttttcattcagcagtttggaaacactctgtttgtaaagtctgcacgtggataacttgaccacttagaggccttcgttggaaacgggtttttttcatgtaaggctagacagaattcccagtaacttccttgtgttgtgtacattcaactcacagagttgaacgttcccttagacagagcagatttgaaacactctttttgtgcaattggcaagtggagatttcaagcgctttaaggtcaatggcagaaaaggaaatatcttcgtttcaaaactagacagaatcattcccacaaactgcgttgtgatgtgttcgttcatctcacagagtttaacctttcttttcatagagcagttaggaaacagtctgtttgtaaattctgtaagtggatattctgacatcttgtggccttcgttggaaacgggatttcttcatattctgctagacggaagaattctcagtaacttccttgtgttgtgtgtattcaactcacagagttgaacgatcctttacacagagcagacttgaaacactctttttgtggaatttgcaagtgcagatttcagccgctttgaggtcaatggtagaaaaggaaactatcttcatataaagactagacagaatgattctcagaaactcctttgtgatgtgtgtgttcaactcacagagtttaacctttcttttcatagagcagttagtaaacactctgtttataaagtctgcaagtggatattcagacccctttgtggccttcgttggaaacgggatttcttcatattatgctagacagaagaattcccagtaacttccttgtgttgtgtgtgttcaactcacagagttgaactttcatttacacagagcaggtttgagacactctttttgtggaatttgctaatggagatttcaagcgctttgaggccaaaggcagaaaaggaaatatcttcgtataaaaactagacagaatcattctcagaaactgctctgcgatgtgtgcgttcaactctcagagtttaacttttcttttcattcagcagtttggaaacactctgtttgtaaagtctgcacgtagataatttgaccacttagaggccttcattggaaacgggtttttttcctgtaaggctagacagaagaattcccagtaacttccttgtgttgtgtacattcaactcacagagttgaacgttcccttagacagagcagatttgaaacactctttttgtgcaattggcaagtggagatttcaagcgctttgaggtcaatggcagaaaaggaaatatcttcgtttcaaaactagacagaatcattcccacaaactgcgttgtgatgtgttcgttcaactcacagagtttaacctttctgttcacagagcagttaggaaacactctgtttctaaagtctgtaagtggatattctgacatcttgtggccttcgttggaaacgggatttcttcatattctgctagacagaagaattctcactaacttccttgtgttgtgtgtattcaactcacagagttgaacgatcctttacagagagcagacttgaaacactctttttgtggaatttgcaagtggagatttcagccgctttgaggtcaatggtagaaaaggaaatatcttcgtataaagactagacagaatgattctcagaaactcctttgtgatgtgtacgttcaactcacagagtttaacctttcttttcttagagcagttaggaaacactctgtttgtaaagtctgcaagtggatattcagacctccttgaggccttcgttggaaacgggtttttttcatataaggctagacagaagaattcccagtaacttccttgtgttgtgtgtgttcaactcacagagttgaactttcatttacacagagcagatttgaaacactctttttgtggaatttgaaagtggagatttcaagcgctttgaggccaaaggcagaaaaggaaatatcttcgtttcaaaactagacagaatcattctcagaaactgctgcgtgatgtgtgcgttcaactctcagagtttaacttttcttttcattcagcggtttggaaacactctgtttgtaaagtctgcacgtggatattttgaccacttagaggccttcattggaaacgggtttatttcatgtaaggctagacagaagaattctcagtaacttccttttgttgtgtacattcaactcacagagttgaacgttcccttacacagagcagatttgaaacactctttttgtgcaattggcaagtggagatttcaagcgctttgaggccaaaggcagaaaaggaaatatcttcgtataaaaactagacagaatcattcccacaaactgcgttgtaatgtgtgcgttcaactcacagagtttaacctttcttttcatagaacagttaggaaacactctgtttgtaaagtctgcaagtggatattcagacctctttgaggccttcgttggaaacgggatttcttcatattctgctagacagaagaattctcagtaacttccttgtgttgtgtgtattcaactcccagagttgaacgttcccttagacagagcagatttgaaacactctttttgtgcaattggcaagtggtgatttcagccgctttggggtcaatggtagaaaaggtaatatcttcgtataaaaactagacagaatgattctcagaaacttcattgtgacgtgtgcgttcaactcagagagtttaacctttcttttcatagagcagttaagaaacactctgtttgtaaagtctgcaagtggatattcagacctctttgaggccttcgttggaaacgggatttcttcatactgtgctagacagaagaattccgagtaacttccttgtgttgtgtgtgttcaactcacagagttgaactttcatttacacagagcagatttgaaacactctttttgtggaatttgcaagtggagatttcaagcgctttgaggccaaaggcagaaaaggaaatatcttcgtttcaaaactagacagaatcattctcagaaactgctctgttatgtgtgcgttcaactctcagagtttaacttttcttttcattcagcagtttggaaacactcagtttgtaaagtctgcacgtggatattttgaccacttagaggtcttcgttggaaacgggtttttttcatgaaaggctagacagaagaattcccagtaacttccttgtgttgtgtacattcaactcacagagttgaacgttcccttagacagagcagatttgaaacactctttttgtgcaattggcaaatggagatttcaagtgctttaaggtcaatggcagaaaaggaaatatcttcgtttcaaaactagacagattgattctcagaaactcctttgtgatgtgtgcgttcaactcacagagtttaacctttcttttcatagagcagttaggaaacactctgtttgtaaagtctgcaagtggatattcagacctctttgaggccttcgttggaaacgggatttcttcctattatgctagacagaagaattctcagtaacttccttgtgttgtgtgtattcaaatcacagagttgaacgatcctttacacagagcagacttcaaacactctttttgtggaatttgcaagtggagatttcagccgctttgaggtcaatagtagaaaaggaaatatcttcgtagaaaaactagacagaatgattctcagaaactcctttgtgatgtgtgcgttcaactcacagagtttaacctttctgttcatagagctgttaggaaacactctgtttgtaaagtctgcaagtggatattcagacctccttcaggccttcgttggaaacgggatttcttcatattctgctagacagaagaattctcagtaacttccttgtgttgtgtgtgttcaactcacagagttgaactttcatttacacagagcagatttgaaacactctttttgtggaatttgcaagtggagatttcaagcgctttgaggccaaaggcagaaaaggaaatatcttcgtttcaaaactagacagaatcattctcagaaactgctctgcgatgtgtgcgtttaactctcagagtttaacttttcttttcattcagcagtttggaaacactctgtttgtaaagtctgcacgtggataatttgactacttagaggccttcgttggaaacgggtttttttcatgtaaggctagacagaagaattcccagtaacttccttgtgttgtgtacattcaactcacagagttgaacgttcccttaaacagagcagatttgaaacactctttttgtgcaattggcaagtggagatttcaagcgctttgaagtcaatggcagaaaaggaaatatcttcgtttcaaaactagatagaatcattcccacaaactgcgttgtgatgtgttcgttcaactcacagagtttaacctttcttttcatagagcagttaggaaacagtctgtttgtaaattctgtaagtggatattctgacagcttgtggccttcgttggaaacgggatttcttcatactatgctagacagaagaattctcagtaacttccttgtgttgtgtgtattcaactcacagtgttgaacgatcctttacacagagcatacttgaaacactcttgttgtggaatttgcaagtggagaattcagccgctttgaggtcaatggtagaataggaaatatcttcctatagaaactagacagaatgattctcagaaacttcattgtgatgtgtgcgttcaactcacagtttaacctttcttttcatagagcagttaggaaacactctgtttgtaaactctgcaagtggatattcagacctctttgaggccttcgttggaaacgggtttttttcatataaggctagacagaagaattcccagtaacttccttgtgttgtgtgtgttcaactcacagagttgtactttcatttacacagagcagatttgaaacactctttttgtggaatttgcaaatggagatttcaagcgctttgaggccaaaggcagaaaaggaaatatcttcgtataaaaactagacagaatcattctcagaaactgctctgcgatgtgtgcgttcaactctcagagtttaacttttcttttcattcagcagtttggaaacacactgtttgtaaagtctgcacgtggatactttgaccacttagaggccttcgttggaaacgggtttttttcctgtaaggctagacagaataattcccagtaacttccttgtgttgtgtacattcaactcacagagttgaacgttcccttggacagagcagatttgaaacactctttttgtgcaattggcaagtggagatttcaagcgcttaaggtcaatggcagaaaaggaaatatcttcgtttcaaaactagacagaatcattcccacaaactgcgttgtgatgtgttcgttcaactcacagagtttaaccattcttttcatagagcagttaggaaacactctgtttgtaaattctgtaagtggatattctgacatcttttggccttcgttggaaacgggatttcttcatattctgctagacagaagaattctcagtaacttccttgtgttgtgtgtattcaactcacagagttgaacgatcctttacacagagcggacttgaaacactcgttttgtggaatttgcaagtggagatttcagccgtgttgaggtaaatagtagaaaaggaaatatcttcgtataaaaactagacagaatgattctcataaactcctttgtgatgtgtgcgttcaactcacagagtttaacctttcttttcatagagcagttaggaaacactctgtttgtaaagtctgcaagtggatattcagacctctttgaggccttcgttggaaacgggatttcttcctattctgctagacagaagaatttccagtaacttccttttgttgtgtgtgttcaactcacagagttgaactttcatttacacagagcagatttgaaacactctttttgtggaatttgcaagtggagatttcaagcgctttgaggccaaaggcagaaaaggaaatatcttcgtataaaaactagacagaatcattctcagaaactgctgcgtgatgtgtgcgttcaactatcagagtttaacttttcttttcattcagcggtttggaaacactctgtttgtaaagtctgcacgtggatattttgaccacttagaggccttcgttggaaacgggttttttgcatgtaaggctaaacagaagaattcccagtaacttccttgtgttgtgtacattcaactcacagagttgaacgttcccttagacagagcagatttgaaacactctttttgtgcaattggcaagtggttatttcagccgctttgaggtcaatggtagaaaaggaaatatcttcgtataaaaactagacagaatgattctcagaaacttcattgtgatgtgtgcgttcaactcacagagtttaacctttctttttatagagcagttaggaaacactctgtttgtaaactctgcaagtggatattcagacctctttgaggccttcgttggaaacgggttttcttcatactgtgctagacagaagaattctcagtaacttccttgtgttgtgtgtattcaactcacagagctgaacgatcctttacacagggcggacttgaaacactctttttgtggaatttgcaagtggagatttcagccgctttgaggtcaatgttagaaaaggaaatatcttcgtataaaaactagacagaatgattctcagaaactcctttgtgatgtgtgcgttcaactcatagagtttaacttttcttttcatagagcagttaggaaacactctgtttgtaaagtcttcaagtggatattcagacctctttgaggccttcgttggaaacgggatttcttcatattctgctagacagaagaattctcagtaacttccttgtgttgtgtgtattcaactcacagagttgaactttcatttagagagagcagatttgaaacactgtttttgtggaatttgcaagtggagatttcaagcgctttggggccaaaggcagaaaaggaaatatcttcgtataaaaactagacagaatcattctcagaaactgctgcatgatgtgtgcgttcaactctcagagtttaacttttcttttcattcagcggtttggaaacactctgtttgtaaagtctgcacgtggatattttgaccacttagaggccttcgttagaaacgggtttttttcatgtaaggctagacagaagaattcccagtaacttccttgtgttgtgtgcattcaactcacagagttgaacgttcccttagacagagcagatttgaaacactctatttgtgcaatttacaagtgtagatttcaagcgctttaaggtcaacggcagaaaaggaaatatcttcgtttcaaacctagacagaatcattcccacaaactgcgttgtgatgtgttcgttcaactcacagagtttaacctttctgttcatagagcagttaggaaacactctgtttgtaaagtctgcaagtggatattcagacctcctagaggccttcgttggaaacgggatttctccatattctgctagacagaagaattgtcagaaacttcgttgtgttgtgtgttttcaactcacagagttgaacgatcctttacacagaatagacttgaaacactctttttgtggaatttgcaagtggagatttcagccgctttgaggtcaatggtagaaaaggaaatatcttcgtataaaaactagacagaatgattctgagaaactcctttgtgatgtgtgcgttcaacacacagagtttaacctttcttttcatagagcagttaggaaacactctgtttgtaaagtctgcaagtggatattcagacctccttgaggccttcgttggaaacgcgatttcttcatattatgctagacagaagaattctcagtaacttccttgtgttgtgtgtattcaactgacagagttgaactttcatttggagagagcagatttgaaacactgtttttgtggaatttgcaagtggagatttcaagcgctttggggccaaaggcagaaaaggaaatatcttcgtagaaaaactagacagaatcattctcagaaactgctgcgtgatgtgtgcgttgaactctcagagtttaacttttcttttcattcagcggtttggaaacactctgtttgtaaagtctgcacgtggatattttgaccacttagaggccttcgttggaaacgggtttttttcatgtaaggctagacagaagaattcccagtaacttcccttgtgttgggtgcattaaactcacagagttgaacgttcccttagacagagcagatttgaaacactctatttgtgcaatttgcaagtgtagatttcaagcgctttaaggtcaatggcagaaaaggaaatatcttcgtttcaaaactagacagaatcattcccacaaactgcgttgcgatgtgttcgttcaactcacacagtttaacatttcttttcatagagcacttaggaaacagactgtttgtaaattctgtaagtggatattctgacatcttgtggccttcgttggaaacaggatttcttcatattctgctagacagaataattctcagtaacttccttgtgttgtgtgtattcaactcacagagttgaatgatcctttacacagagcagacttgaaacactctttttgtggaatttgcaagtggagatttcagccgctttgaggtcaatggtagaaaaggaaactatcttcatataaagactagacagaatgattctgagaaactcctttgtgatgtgtgcattcaactcacaaagtttaacctttcttttcatagagcagttaggaaacactctgtttgtaaagtctgcaagtggatattcagacctccttgaggccttcgttggaaacgggatttcttcatattatgctagacagaagaattgtcagtaacttccttgtgttgtgtgtattcaactcacagagttgaacgatcctttacacagagcagacttgaaacactctttttgtggaatttgcaagtggagatttcagccgctttgagttcaagggtagaataggaaatatcttcctatagaaactagacagaatcattctcagaaactgctctgcgatgtgtgcgttcaactctcagagtttaacttttcttttcattcagcagtttggaaacactctgtttgtaaagtctgcacgtggatattttgaccacttagaggccttcgttggaaacgggtttctttcttgtaaggctagacagaagaattcccagtaactttccttgtgttgtgtgcgttcaactcacagagttgaactttcatttacacagagcagatttgaaacactctttttgtggaatttgcaaatggagatttcaagcgctttgaggccaaaggcagaaaaggaaatgtacttcgtttcaaaactagacagaatcattcccacaaactgcgttgtgatgtgttcgttcaactcacagagtttaacctttcggttcatagagcagttaggaaacactctgtttgtaaagtctgtaagtggatattctgacgtcttgtggccttcgtttgaaaagggatttcttcatattctgctagacagaagaattctcggtaacttccttgtgttgtgtgtattcaactcacagagttgaacgatcctttacacagagcagacttgaaacactctttttgtggaatttgcaagtggagatttcagccgctttgaggtcaatgttagaataggaaatatcttcatatagaaactagacagaatgattctcagaaactcctttgtgatgtgtgcgttcaactcacagagtttaacctttcttttcatagagcagttaggaaacactgtgtttgtaaagtctgcaagtggatattcagacctccttgaggcattcgttggaaacgggatttcttcatattatgctagacagaagaattcccagtaacttccttgtgttgtgtgtgttctactcacagagttgaactttgatttacacagagcagatttgaaacactctttttgtggaatttgcaagtggagatttcaagcgctttgaggccaaaggcagaaaaggaaatatcttcgtataaaaactagacagaatcattctcagaatctgctgcgtgatgtgtgcgttcaactctcagagtttaacttttcttttcattcagcggtttggaaacactctgtttgtacagtctgcacgtggatattttgaccacttagaggccttcgttggaaacgggtttttttcatgtaaggctagacagaagaattcccagtaacttccttgtgttgtgtgcattcaactcacagagttgaacgttcccttagacagagcagatttgaaacactctatttgtgcaatttgcaagtgtagttttcaagctctttaaggtcaacggcagaaaaggaaatatcttggtttcaaaactagacagaatcattcccacaaacagcgttgtgatgtgttcgctcaactcacagagtttaacctttcttttcatagagcagttaggaaacagtctgtttgtcaattctgtaagtggatattctgacatcttgtggccttcgttggaaacgggatttcttcatattctgctagacagaagaattctcagtaacttccttgtgttgtctgtattcaactcacagagttgaacgatcctttacacagagcagacttgaaacactctttttgtggaatttgcaagtggagatttcagccgctttgaggtcaatagtagaaaaggaaatatcttcgtataaagactagacagaatgattctcagaaactcctttgtgatgtgtgcgttcaactcacagagtttaacctttcttttcatagagcagttgggaaacactctgtttgtaaagtctgcaagtggatattcagacatccttgaggctttcgttggaaacgggatttcttcatattctgctagaaggaagaattctcagtaacttccttgtgttgtgtgtatacaactcacagagttgaacgatcctttacacagagcggacttgaaacacactttttgtggaatttgcaagtggagatttcaagcgctttgaggccaaaggcagaaaaggaaatatcttcgtataaaaactagacagaatcattctcagaaactgctgtgtgatgtgtgccttcaactctcacagtttaacttttcttttcattcagcggtttggaaacactctgtttgtaaagtctgcacgtggatattttgaccacttagaggccttcgttggaaacgggtttttttcatgtaaggctagacagaagaattctcagtaacttccttgtgttgtgtgtattcaactcacacagttgaacgatcctttacacagagcagacttgtaacactctttttgtggaatttgcaagtggagatttcagccgctttgaagtcaaatgtagaaaaggaaatatcttcctataaaaactagacagatgattctgagaaactcctttgtgatgtgtgcgttcaactcacagagttcaacctttcttttcatagagcagttaggaaacactctgtttgtaaagtctgcaagtggatattcagacatctttgaggctttcgttggaaacaggatttcttcatattctgctagacagaagattctcagtaacttccttgtgttgtgtgtattcaactcacagagttgaacgatcctttacacagagcagacttgaaacactctttttgtggaatttgcaagtggagatttcagccgctttgaggtcaatggtagaataggaaatatcttcctatagaaactagacagaatgattctcagaaactcctttgtgatgtgtgtgttcaactcacagagtttaacctttcttttcatagagcagttaggaaacactctgtttgtaaagtctgcaagtggatattcagacctctttgaggccttcgttggaaacgggattttttcgtataaggctagacagaagaattcccagtaacatccttgtgttgtgtgtgttcaactcacagagttgaactttcatttacacagagcagatttgaaacactctttttgtggaatttgcaaatggagatttcaagcgctttgaggccaaaggcagaaaaggaaatatcttcgtataaaaactagacagaatcattctcagaaactgctctgcgatgtgtgcgttcaactctcagagtttaacttttcttttcattcagcagtttggaaacactctgtttgtaaagtctgcacgtggatattttgaccacttagaggccttcgttggaaacgggtttttttcctgtaacgctagacagaagaattcccagtaacttccttgtgttgtgtacattcaactcacagagttgaacgttcccttagacagagcagatttgaaacactctttttgtgcaattggcaagtggagatttcaagcgctttgaggtcaatggcagaaaaggaaatatcttcgtttcaaaactagacagagtgattctcagaaactcctttgtgatgtctgcgttcaactgacagagtttaacctttcttttcatagagcagttaggaaacactctgtttgtaaagtctgcaattggatattgagacctccttgaggccttcgttggaaacgggatttcttcatattctgctatacagaagaattctcagaaacttccttgtgttgtgtgtattcaactcacagagttgaacgatcctttacacagagcagacttgaaacactctttttgtggaattggcaagtggagatttcagccgctttgaggtcaatggcagaaaaggaaatatcttcgtataaaaactagacagaatgattctcagaaacttcattgtgatgtgtgcgttcaactcacagagcttaacctttcttttcatagagcagttaggaaacactctgtttgtaaactctgcaagtggatattcagacctctttgaggccttcgttggaaacgggatttcttcatactgtgctagacagaagaattcccagtaacttccttgtgtagtgtgtgttcgactcacagagttgaactttcctttacacagagcagatttgaaacactctttttgtggaatttgcaagtggagatttcaagcgctttgaggccaaaggcagaaaaggaaatatcttcgtttcaaaactagacagaatcattctcagaaactgctgcgtgatgtgtgcgttcaactctcagagtttaacttttcttttcattcagcggtttggaaacactgtgtttgtaaagtctgcacgtggatattttgaccacttagaggccttcgttggaaacgggtttctttcatgtaaggctagacagaagaattcccagtaacttccttgtgttgtgtgcactcaactcacagagttgaacgttcccttagacagagcagatttgaaacactctatttgtgcaatttgcaagtgtagatttcaagcgctttaaggtcaatggcagaaaaggaaatatcttcgtttcaaaactagacagaatcattcccacaaactgcgttgtgatgtgttcgttcaactcacagagtttaacctttctgttcatagagcagttaggaaacactgtgtttgtaaagtctgtaagtggatattctgacatcttctggccttcgttggaaacgggatttcttcatattctgctagacagaagaattctcagaatcttccttgtgttgtgtgtattcaactcacagagttgaacgatggtttacacagaacagatttgaaacactctttttgtggaatttgcaagtggagatttcagccgctttgaggtccgtggtagaaaaggaaatatcttcgtataaaaactagacagaatgattctcagaaactcctttgtgatgtgtgcgttcaactcacagagtttaacctttcttttcatagagcagttaggaaacactctgttggtaaagtctgcaagtggatattcagacctctttgaggccttcgttggaaacgggtttttttcatataaggctagacagaagaattcccagtaacttccttgtgttgtgtgtgttcaactcacagagttgaactttcatttacacagagcagatttgaaacactctttttgtggaatttgcaagtggagatttcaggcgctttgaggccaaaggcagaaaaggaaatatcttcgtataaaaactagacagaatcattctcagaaactgctgtgtgatgtgtacgttcaactctcagagttcaacttttcttttcattcagcggtttggaaacactctgtttgtaaagtctgcacgtggatattttgaccacttagaggccttcgttggaaacggttttttttcatgtaaggctagacagaagaattcccagtaacttccttgtgttgtgtgtgttcaactcacagagttgaactttcatttacacagagcagatttgaaacactctttttgtggaatttgcaaatggagatttcaagcgctttgaggccaaaggcagaaaaggaaatatcttcgtttcaaaactagacagaatcattctcagaaacttctttgtgatgtgtgcgttcaactcacagagtttaacctttcttttcatagagcagttaggaaacactctgtttgtaaagtctgcaagtggatattcatacctctttgaggccttcgttggaaacgggatttcttcatactatgctagacagaagaattctcagtaacttccttgtgttgtgtgtattcaactcacagtagttgaacgatcctttacacagagcagtcttgaaacactctttttgtggaatttgcaagtggagatttctgccgctttgaggtcaatggtagaataggaaatatcttcctatagaaactagacagaatgattctcagaaaatcttttgtgatgtgtgcgttcaactcacagagtttcacttttcttctcatggagcagttaggaaacactctgtttgtaaagtctgcaagtggatattcagacccctttgaggccttcgttggaaacgggatttcttcatattctgctagacagaagaattctcagtaacttccttgtgttgtgtgtattcaactgacagagttgaactttcgtttagagagagcagatttgaaacactgtttttgtggaatttgcaagtggagatttcaagcgctttggggccaaaggcaaaaaacgaaatatcttcgtataaaaactagacagaatcattctcagaaactgctgcgtgatgtgtgcgttcaactctcagagtttaacttttcttttcattcagcggtttggaaacactctgtttgtaaagtctgcacgtggacattttgaccacttagaggccttcgttggaaacgggtttttttcatgtaaggctagacagaagaattcccagtaacttccttgtgttgtgtacattcaactcacagagttgaacgttcccttagacagagcagatttgaaacactctttttgtgcaattggcaagtggagatttcaagcgctttaaggtcaatggcagaaaaggaaatatcttcgtttcaaaactagacagaatcattcccacaaactgcgttgtgatgtgttcgttcatctcacagagtttaacctttcttttcatagagcagttaggaaacactctgtttgtaaattctgtaagtggatattctgacatcgtgtggccttcgttggaaacgggatttcttcatattctgctagacagaagaattctcagtaacttccttgtgttgtgtgtattcaactcacagagttgaacgatcctttacacagagcagacttgaaacactctttttgtggaatttgcaagtggagaattcagccgctttgaggtcaatggtagaaaaggaaactatcttcgtataaagaatagacagaatgattctcagaaactcctttgtgatgtgtgcgttcaactcacagagtttaacctttcttgttcatagagcagttaggaaacactctgtttgtaaagtctgcaagtggatattcagacatccttgaggctttcgttggaaacgggatttcttcatattctgctagacaagataattctcagtaacttccttgtgttgtgtgtattcaactgacagagttgaacgttcatttagagagagcagatttgaaacactgtttttgtggaatttgcaattggagatttcaagcgctttggggccaaaggcagaaaaggaaatatcttcgtataaaaactagacagaatcattctcagaaactgctgcgtgatgtttgcgttcaactctcagagtttaacttttcttttcattcagcggtttggaaacactctgtttgtaaagtctgcacgtggaaattttgaccacttagaggccttcgttggaaaagggtttttttcatgtaaggctagacagaagaattctcagtaacttccttgtgttgtgtgtattcaagtgtcacagttgaactttcatttaggccaagcagatttgaaacactctttttgtgcaattggcaagtgcagatttcaagcgctttaaggtcaatggcagaaaaggaaatatcttcgtttcaaaactagacagaatcattcccacaaactgcgttgtgaggtgttcgttcaactcacagagtttaacctttcttttcatagagcagttaggaaacagtctgtttgtaaattctgtaagtggatattctgacatcttgtggccttcgttggaaacgggatttcttcatattctgctagacagaataattctcagtaacttccttgtgttgtgtgtattcaactcacagagttgaaggatcctttacagagagcaggcttgaaacactctttttgtggaatttgcaagtggagatttcagccgctttgaggtcaatggtagaataggaaatatcttcctatagaaactagacagaatgattctcagaaactcctttgtgatgtgtgcgttcaactcacagagtttaacctttcttttcatagagcagttaggaaacactctgtttgtaaagtctgcaaatggatattcagacctctttgaggccttcgttggaaacgggatttcttcatattctgctagacagaagaattctcagtaacttccttgtgttgtgtgtattcaactgacagagttgaactttcatttagagagagcagatttgaaacactgtttttgtggaatttgcaagtggagatttcaagcgctttggggccaagggcagaaaaggaaatatcttcgtataaaaactagacagaagcattctcagaaactgctgcgtgatgtgtgcgttcaactctcagagtttaacttttcttttcattcagcggtttggaaacactctgtttgtaaagtctgcacgtggatattttgaccacttagaggccttcgttggaaacgggttttttgcaagtaaggctagacagaagaattctcagtaaattccttgtgttgtgtgtattcaactcacagagttgaacgatcctttacacagagcagacttgaaacactctttttgtggaatttgcaagtggagatttcagccgctttgaggtcaatggcagaaaaggaaatatcttcgtataaagactagacagaattattctcagaaactcctttgtgatatgtgcgttcaactcacagagtttaacctttcttttcatagagcagttaggaaacactctgtttgtaaagtctgcaagtggatattcagacctctttgaggccttcgttggaaacgggatttcttcatattctgctagagagaagaattctcagtaacttccttgtgttgtgtgtattcaactcacagagttcaacgatcctttacacagagcagacttgaagcactctttttgtggaatttgcgagtggagatttcagccgctttgaggtcaatggtagaataggaaatatcttcctatagaaactagacagagtgattctcagaaactcctttgtgatgtttgcgttcaactcacagagtttaacctttcttttcatagagcagttaggaaacactctgtttgtaaagtctgcaagtggatattcagacctccttgtggccttcgttggaaacgggatttcttcatattctgctatacagaagaattctcagtaacttccttgtgttgtgtgtattcaactgacagagttgaactatcatttagagagagcagatttgaaacactgtttttgtggaatttgcaagtggagatttcaagcgctttggggccaaaggcagaaaaggaaatatcttcgtataaaaactagacagaatcattctcagaaactgctgcgtgatgtgtgcgttcaactctcatagtttaacctttcttttcattcagcggtttggaaacactctgtttgtaaagtctgcacgtggatattttgaccacttagaggccttcgttggaaacgggtttttttcatgtaaggctagacagaagaattcccagtaacttccttgtgttgtgtgcattcaactcacagagatgaacattcccttagacacagcagatttgaaacactgtatttgtgtaatttgcaagtgtagattaaaagcgctttaaggtcaatggcagaaaaggaaatatcttcgtttcaaaactagacagaatcattcccacaaactgcgttgtgatgtgttcgttcaactcacagagtttaacctttctgctcatagagcagttaggaaacactctgtttgtaaagtctgtaagtggatattctgacctcttgtggccttcgttggaaacgggatttcttcatattctgctagacagaataattctcagtaacttccttgtgttgcgtgtattcaactcacagagttgaacgatcctttacagagagcagacttgaaacactctttttgtggaatttgcaagtggagatttcagccgctttgaggtcaatgatagaataagaaatatcttcctatagaaactagacagaatgattctcagaaactcctttgtgatgtgtgcgttcaactcacagagttcaaactttcttttcatagagcagttgggaaacactctgtttgtaaagtctgcaagtggatattcagacttctttgaggccttcgttggaagcgggatttcttcatattctgctagacagaagaattctcagtaacttccttgtgttgtgtgtattcaactgacagagctgaactttcatttagagagagcagatttgaaacactgtttttgtggaatttgcaagtggagatttcaagcgctttggggccaaaggcagaaaaggaaatatcttcgtataaaaactagacagaatcattctcagaaactgctctgcgatgtgtgcgttcaactctcagagtttaacttttcttttcattcagcagtttggaaacactgtgtttgtaaagtctgcacgtggatattttgaccacttagaggccttcgttggaaacgggtttttttcctgtaaggctagagagaagaattcccagtaacttccttgtgttgtgtacattcaactcacagagttgaacgttcccttagacagagcagatttgaaacactctttttgtgcaattggcaagtgctgatttcagccgctttgaagtcaatggtagaaaaggaaatatcttcgtataaaaactagacagaatcattcccacaaactgcgttgtgatgtgttcgttcaactcacagcagtttaacctttctgttcatagagcagttaggaaacactctgtttgtaaagtctgtaagtggatattctgacatcttgtggccttcgttggaaacgggatttcttcattttctgctagacagaagaattctcagaaacttccttgtgttgtgtgttctcaactcacagagttgaacgatgctttacacagagtagacttgaaacactctttttgtgtaatttgcaagtggagatttcagccgctttgaggtcaatggtagaaaaggaaatatcttcgtataaaaactagacagaatgattctcagaaactcctttgtgatgtgtgcattcaactcacagagtttaacttttcttttcatagagcagttaggaaacactctgtttgtaaagtctgcaagaggatattcagacctctttgaggccttcgttggaaacgggtttttttcatataaggctagacagaagaattcccagtaacttccttgtgttgtgtgtgttcaactcacagagttgaactttcatttacacagagcagatttgaaacactctttttgtggaatttgcaaatggaggtttgaagcgctttgaggccaaaggcagaaaaggaaatatcttcgtataaaaactagacagaatcattctcagaaactgctctgcgatgtgtgcgttcaactctcagagtttaacttttctttacattcagcagtttgggaacactctgtttgtaaagtctgcacgtggatattttgaccacttagaggccttcgttggaaacgggtttttttcctgtaaggctagacagaagaattctcagtaacttccttgtgttgtgtgtattcaactcacagagttgaacgatcctttacagagagcagacttgaaacactctttttgtggaatttgcaagtggagatttcagccgctttgaggtcaatagtagaaaaggaaatatcttcgtataaagactagacagaatgattctcagaaactcctttgtgatgtgtgcgttcaacacacagattttaacttttcttttcatacagcagttaggaaacactctgtttgtaaagtctgcaagtggatattcagacctctttgaggccttcgttggaaacgggatttcttaatattatgctagacagaataattctcagtaaattccttgtgctgtgtgtattcaactcacagagttgaacgatcctttacagagagcagacttgaaacactctttttgtggaatttgcaagtggagatttcagcctcttggaggtcaatggtagaataggaaatatcttcctatagaaactagacagaatgattctcagaaactcctttgtgatgtgtgcgttcaactcacagagtttaacctttcttttcatagagcagttcaggaaacactctgtttgtaaagtctgcaagtggatattcagacttctttgaggccttcgttggaaacgggatttcttcatattctgctagacagaagaattctcagtaacttccttgtgttgtgtgtattcaactcacggagttgaatgatcctttacacagagcagacttgaaacactctttttgtggaatttgcaagtggagatttcagccgctttgaggtcaatagtagaaaaggaaatatcttcgtagaaaaactagacagaatcattctcagaaactgctctgcgatgtgtgcgttcaactctcagagtttaactttgtttttcattcagcagtttggaaacactctgtttgtaaagtctgcacgtggataatttgaccacttagaggccttcgttggaaacgggtttttttcatgtaaggctagacagaagaattcccagtaacttccttgtgttgtgtgcattcaactcacagagttgaacgttcccttagacagagcagatttgaaacactctatttgtgcaatttgcaagtgtagttttcaagctctttaaggtcaacggcagaaaaggaaatatcttcgtttcaaaactagacagaatcattcccaaaaactgcgttgtgatgtgttggttcaactcacagagtttaacctttctgttcatagagcagttaggaaacactctgtttgtaaagtctgtaagtggatattctgacatcctgtggccttcgttggaaacgggatttcttcatattctgctagacagaagaattctcagtaacttccttgtgttgtgtgtattcaactcacagagttgaacgatcctttacacagagcggacttgaaacactctttttgtggaatttgcaagtggagattttagccgatttgaggtcaatggtagaataggaaatatcttcctatagaaactagacagaatgattctcataaactcctttgtgatgtgtgcgttcaactcacagagtttaacttttcttttcatagagcagttaggaaacactctgtttgtaaagtctgcaagtggatattcagacctctttgaggccttcgttggaaacgggatttcttcatattatggtagacagaataattctcagtaacttccttgtgttgtgtgtattccactcacagagttgaacgatcctttacagagagcagacttgaaacactctttttgtggaatttgcaagtggagatttcagccgctttgaggtcaatggtagaaaaggaaatatcttcgtataaagactagacagaatcattctcagaaactgctctgcaatgtgtgcgttcaactctcagagtttaacttttcttttcattcagcagtttggaaacactctgtttgtaaagtctgcacgtggatattttgaccacttagaagccttggttggaaacgggtttttttcctgtaaggctagacagaagaattcccagtaacttccttgtgttgtgtacattcaactcacagagttgaacgttcccttagacagagcagatttgaaacactctttttgtgcaattggcaaatggagatttcaagcgctttaaggtcaatggcagaaaaggaaatatctccgtttcaaaactagacagaatcattcccacaaactgcgttgtgatgtgttcgttcaactcacagagtttaacctttcttttcatagagcagttaggaaacagtctgtttgtcaattctgtaagtggatattctgacatcttgtggccttcgttggaaacgggatttcttcatattctcctagacagaagaattctcagtaacttccttgtgttgtgtgtattcaactcacagagttgaacgaccctttacacagagcagattacaaacactctttttgtggaatttgcaagtggagatttcagccgctttgaggtcaatggtagaaaaggaaatatcttcgtacaaaaactagacagaatgtttctcagaaacttctttgtgatgtgtgcgttcaactcacagagtttcacctttcttttcatagagcagttaggaaacactctgtttgtaaactctgcaagtggatattcagacctctttgaggccttcgttggtaacgggatttcttcatactgtgctacacagaagaattctcagtaacttccttgtgttgtgtgtattcaactgacagagttgaactttcatttagagagagcagatttgaagcactgtttttgtggaatttgcaagtggagacttcaagcgctttggggccaaaggcagaaaaggaaataccttcgtataaaaactagacagaatcattctcagaaactgctctgcgatgtgtgcgttcaactctcagagtttaacttttcttttcattcagcagtttggaaacactctgtttgtaaagtctgcacgtggataatttgaccacttagaggccttcgttggaaacggttttttttcatgtaaggctagacagaagaattcccagtaacttccttgtgttgtgtgcattcaactcacagagatgaacgttcccttagacagagcagatgtgaaacactcaatttgtgcaatttgcaagtgtagatttcaagcactttaaggtcaatggcataaaaggaaatatcttcgtttcaaaactagacagaatgattctcatgaactcctttgtgatgtgtgcgttgaactcacagagtttaacctttcttttcatagagcagttaggaaacactctgtttgtaaagtctgcaagtggatattcagacctccttgaggccttcgttggaaacgggctttcttcatattctgctagacagaagaattctcagtaacttccttgtgttgtgtttattcaactcacagatttgaatgatcctttacacagagcagacttgaaacactctttttgtgtaatttgcaagtggagatttcagccgatttgaagtcaatggtagaaaagtaaatatcttcgtataaagactagacagaatgattctcagaaacttctttgtgatgtgtgtgttcaactcacagagtttaacctttcttttcatagagcagttaggaaacactgtgtttttaaactctgcaagtggatattcagacctctttgaggccttcgttggaaacgggatttcttcatactgtgctagacagaagaattctcagtaacttccttgtgttgtgtgtattcaactcacagagttgaacgatcctttacacagagcagacttgaaacactctttttgtggaatttgcaagtggagatttcagccgccttgaggtcaatggtagaaaaggaaatatcttcgtataaaaactagacagaatcattctcagaaactgctctgcgatgtgtgcgttcaattctcagagtttaacttttcttttcattcaacagtttggaaacactctgtttgtaaagtctgcacgtggatattttgaccacttagaggccttcgttggaaacgggtttctttcctgtaaggctagacagaataattctcagtaacttccttgtgttgtgtgtattcaactcacagagttgaaggatcctttacagagagcaggcttgaaacactctttttgtcgaatttgcaagtggaggtttcagccgctttgaggtcaatggtagaataggaaatatcttcttatagaaactagacaaaatgattctcatgaactcctttgtgatgtgtgcgttcaactcacagagtttaacctttcttttcatagagcagttaggaaacactctgtttgtaaagtctgcaagtggatatttagacctccttgaggccttcgttggaaacgggatttcttcatattctgctagacagaagaattctcagtaacttccttgtgttgtgtttattcaactcacagagttgaatgatcctttacacagagcagacttcaaacactctttttgtggaatttgcaagtggagatttcagccgctttgaggtcaatggtagaaaagtaaatatcttcgtataaagactagacagaatgattctcagaaactcctttgtgatgtgtgcgttcaactcacagagtttaacctttcttttcatagagcagttgggaaacactctgtttgtaaagtctgcaagtggatattcagacttctttgaggccttcgttggaagcgggatttcttcatattctgctagacagaagaattctcagtaacttccttgcgttgtgtgtattcaactcacagagttgaacgatcctttacacagagcagacttgaaacactctttttgtggaatttgcaagtggagatttcagccgctttgaggtcaatggtagaataggaaatatcttcctatagaaactagacagaatcattctcagaaactgctgcgtgatgtgtgcgttcaactctcagagtttaacttttcttttcattcagcgctttggaaacactctgtttgtaaagtctgcacgtggatattttgaccacttagaggccttcgttggaaacgggtttttttcatgtaaggctagacagaaaaattcccagtaacttccttgtgttgtgtgcattcaactcacagagttgaacgttcccttagacagagcagatttgaaacactctatttgtgcaatttgcaagtgtagatttcaagcgctttaaggtcaacggcagaaaaggaaatatcttcgttttaaaactagacagaatcattcccacaaactgtgttgtgatgtgttcgttcaactcacagagtttaacctttcttttcatagagcagttaggaaacagtctgtttgtcaattctgtaagtggatattctgacatcttgtggccttcgttggaaacgggatttcttcatattctgctagacagaagaattctcagtaacttccttgtgttgtgtgtattcaactcacagagttgaacgatcctttaaacagagcagacttgaaacactctttttctggaatttgcaagtggagatttcagccgctttgaggtcaatgttagaataggaaatatcttcctatagaaactagacagaatgattctcagaaactcctttgtgatgtgtgcgttcaactcacagagttcaaactttcttttcatagagcagttgggaaaaactctgtttgtaaagtctgcaagtggatattcagacttctttgaggccttcgttggaagcggggtttcttcatattctgctagacagaagaattctcagtaacttcccttgtgttgtgtgtattcaactgacagagttgaactttcatttagagagagcagatttgaaacactgtttttgtggaatttgcaagtggagatttcaaacgctttggggccaaaggcagaaaaggaaatatcttcgtataaaaactagacagaatcattctcagaaactgctctgcgatgtgtgcattcaactctcagagtttaacttttcttttcattcagcagtttggaaacactctgtttgtaaagtctgcacgtggataacttgaccacttagaggccttcgttggaaacgggtttttttcatgtaaggctagacagaagaattcccagtaacttccttgtgttgtgtgcattcaactcacagagttgaacgttcccttagacagagcagatttgaaacactctatttgtgcaatttccaagtgtagatttcaagcgctttaaggtcaacggcagaaaaggaaatatcttcgtttcaaaactagacagaatgattctgagaaactcctttgtgatgtgtgcgttcaactcccacagtttaacctttcttttcatagagcagttaggaaacactctgtttgtaaagtctgcaagtggatattcaggacctccttgaggccttcgttggaaacgggatttcttcatattatgctagacagaagaattctcagtaacttccttgtgttgtgtgtattcaactcacagagttgaacgatcctttacacagagcagacttgaaacactctttctgtggaatttgcaagtggagatttcaggcgctttgaggtcaatagtagaaaaggaaatatcttcgtagaaaaactagacagaatgattctcagaaactcctttgtgatgtgtgtgttcaactcacagagtttaacctttcttttcatagagcagttagtaaacagtctgtttataaagtctgcaagtggatattcagacccctttgaggccttcgttggaaacgggatttcttcatattatgctagacagaagaattctcagtaacttccttgtgttgtgtgtattcaactgacggagttgaactatcatttagagagagcagatttgaaacactgtttttgtggaatttgcaagtggagatttcaagcgctttggggccaaaggcagaaaaggaaatatcttcgtataaaaactagacagaatcattctcagaaactgctctgcgatgtgtgcgttcaactctcagagtttaacttttcttttcattcagcagtttggaaacactctgtttgtaaagtctgcatgtggatattttgaccacttagaggccttcgttggaaacgggtttttttcctgtaaggctagacagaagaattcccagtaacttccttgtgttgtgtacattcaactcacagagttgaacgttcccttagacagagcagatttgaaacactctttttgtgcaattggcaaatggagatttcaagcgcttgaaggtcaatggcagaaaaggaaatatcttcgtttcaaaactagacagaatcattcccacaaactgcgttgtgatgtgtgcgttcaactcaaagagtttaacctttcttttcatagagcagttaggaaacactctgtttgtaaagtctgcaagtggatattcagacctccttgaggccttcgttggaaacgggatttcttcatattctgctagacagaataattctcagtaacttcattgtgttgtgtgtattcaactcacagagttgaaggatcctttacagagagcaggcttgaaacactctttttgtcgaatttgcaagtggagatttcagccgctttgaggtcaatggtagaataggaaatatcttcttatagaaactagacagaatgattctcagaaactcctttgtgatgtgtgtgttcaactcacagagtttaacctttcttttcatagagcagttagtaaacactctgtttataaagtctgcaagtggatattcagacccctttgaggccttcgttggaaacgggatttcgtcatattatgctagacagaagaattctcagtaacttccttgtgttgtgtgtattcaactcacagagttgaacgatcctttacacagagcagattagaaacactctttttgtggaatttgcaggtggagatttcagccgctttgaggtcaatagtagaaaagggaatatcttcgtataaaaactagacagaaatcattctcagaaactgctctgcgatgtgtgcgttcaactctcaggagtttaacttttcttttcattcagcagtttggaaacactctgtttgtaaagtctgcacgtggatattttgaccacttagaggccttcgttggaaacgggtttttttcctgtaaggctagacagaagaattcccagtaacttccttgtgttgtgtacattcaactcacagagttgaacgttcccttagacagagcagatttgaaacactctttttgtgcaattggcaaatggagatttcaagcgctttaagttcaatggcagaaaaggaaatatcttcgtttcaaaagtagacagaatgattctcagaaactcctttgtgatgtgtgcgtgcaactcacagagtttaacttttcttttcatagagcagttaggaaacactctgtttgtaaagtctgtaagtggatattctgacatcttgtggccttcgttggaaacgggatttcttcatattctgctagacagaagagttctcagtaacttccttgtgttgtgtgtattcaactcacagagttgaacgatcctttacacagagcagacttgaaacactctttttgtggaatttgcaagtggagatttcagccgctttgaggtcaatagtagaaaaggaaatatcttcgtagaaaaactagacagagtgattctcagaaactcctttgtgatgtctgcgttcaactcacagagtttaacgtttcttttcatagagcagttaggaaacactctgattgtaaagtctgcaagtggatattcagacctccttgaggccttcgttggatacgggatttcttcatattctgctatacagaagaattctcagtaacttccttgtgttgtgtgtattcaactgacatagctgaactttcatttagagagagcagatttgaaacactgtttttgtggaatttgcaagtggagatttcaagcgctttggggccaaaggcagaaaaggaaatatcttcgtataaaaactagacagaatcattctcagaaactgctgcgtgatgtgtgcgttcaactctcagagtttaacttttcttttcattcagcggtttggaaacactctgtttgtaaagtctgcacgtgggtattttgaccacttagaggccttcgttggaaacgggtttttttcatgtaaggatagacagaagaattcccagtaacttccttgtgttgtgtgcattcaactcacagagttgaacgttcccttagacagagcagatttgaaacactctatttgtgcaatttgcaagtgtagatttcaagcgctttaaggtcaacggcagaaaaggaaatatcttcgtttcaaaactagacagaatcattcccacaaactgcgttgtgatctgttcgttcaactcacagagtttaacctttctgttcatagagcagttaggaaacactctgtttgtaaagtctgtaagtggatattctgacatcttgtggccttcgttggaaacgggatttcttcatattctgctagacagaagaattctcagaaacttccttgtgttgtgtgttttcaactcacagagttgaacgatgctttacacagagcagacttgaaacactcattttgtggaatttgcaaggggagatttcagccgctttgaggtcaatggtagaataggaaatatcttcctatagaaactagccagaatgattctcagaaactcctttgtgatgtgtgcgttcaactcacggagtttaacctttcttttcatagagcagttaggaaacactctgtttgtaaagtctgcaagtggatattcagacatccttgaggctttcgttggaaacgggatttcttcatattctgctagaaagaagaattcccagtaacttccttgtgttgtgtgtgttcaactcacagagttgaactttcatttacacagagcagatttgaaacactctttttgtggaatttgcaagtggagatttcaagcgctttgagaccaaaggcagaaaaggaaatatcttcgtttcaaaacaagacagaatcattctcagaaactgctgcgtgatgtgtgcgttcaactctcagagtttaacttttcttttcattcagcggtttggaaacactctgtttgtaaagtctgcacgtggaaattttgaccacttagaggccttcgttggaaacgggattttttcatgtaaggctagacagaagaattcccagtaacttccttgtgttgtgtgcattcaactcacagagttgaacgttccttagacacagcagatttgaaacactctatttgtgcaatttgcaagtgtagatttcaagcgctttaaggtcaatggcagaaaaggaaatatcttcgtttcaaaactagacagaatcattcccacaaactgcgttgtgatgtgttcgttcaactcacagagtttaacctttcttttcatagagcagtgaggaaacagtctgtttgtcaattctgtaagtggatattctgacatcttgtggccttcgttggaaactggatttcttcatattctgctagacagaataattctcagtaacttccttgtgttgtgtgtattcaactcacagagttgaacgatcctttacacagagcagacttgaaacactctttttgtgggatttgcaagtggagatttcagccgctttgaggtcaatggtagaataggaaatatcttcctatagaaactagacagaatgattctcagaaactcctttgtgatgtgtgtgttcaactcacagagtttaacctttcttttcatagagcagttaggaaacactctgtttgtaaagtctgcaagtggatattcagacctcgttgaggccttcgttggaaacgggatttcttcatattctgctagacagaagaattcccagctaacttccatgtgttgtgtgtgttcaactcacagagttgaactttcatttacacagagcagatttgaaacactctttttgtggaatttgcaaatggagatttcaagcgctttgaggccaaaggcagaaaaggaaatatcttcgtataaaaactagacagaaatcattctcagtaaactgctgcgtgatgtgtgcgttcaactctcagagtttaacttttcttttcattcagcggtttggaaacactctgtttgtaaagtctgcacgtggaaattttgaccacttagaggccttcgttggaaacgggtttttttcatgtaaggctagacagaagaattctcagtaacttccttgtgttgtgtgtattcaactcacagagttgaacgatcctttacacagagcagacttgaaacactctttttgtggaatttgcaagtggagatttcagccgctttgaggtcaatggtagaaaaggaaatatcctcgtatagaaacaagacagaatgattctcagaaactcctttgtgatgtttgcgttcaactcacagagtttaacctttcttttcatagagcagttaggaaacacactgtttataaagtctgcaagtggatattcagacctccttgaggccttcgttggaaacgggatttcttcatattctgctagacagaagaattcccagtaacttccttgtgttgtgtgtattcaactcacagagttgaacgatcctttacacagagcagacttgaaacactctttttgttgaatttgcaagtggagatttcagccgctttgaggtcaatggtagaataggaaatatcttcctatagaaactagacagaatgattctcagaaactcgtttgtgatgtgtgtgttcaactcacagagtttaacctttcttttcatagagccgttagtaaacactctgtttataaagtctgcatgtggatattcagacccctttgaggccttcgttggaaacgggatttcttcatattatgctagacagaagatttctaagtaacttccttgtgttgtgtgtattcaactgacagagtttaactttcatttagagagagcagatttgaaacactgttttcgtggaatttgcaattggagatttcaagcgctttggggccaaaggcagaaaaggaaatatcttcgtataaaaactagacagaatcattctcagaaactgctctgcgatgtgtgcgttcaactctcagagtttaacttttcttttcattcagcagtttggaaacactctgtttctaaagtctgcacgtggataatttgaccacttagaggccttcgttggaaacgggtttttttcatgtaaggctagacagaagaattcccagtaacttccttgtgttgtgtgcattcaactcacagagatgaacattcccttagacagagcagatttgaaacactctatttgtgtaatttgcaagtgtagatttcaagcgatttaaggtcaatggccgaaaaggagatatcttcgtttcaaaactagacagaatgattctctgaaactcctttgtgatgtgtgcgttcaactcacagagtttaacctttcttttcatagagcagttaggaaacactctgtttgaaaagtctgcaagtggatattcagacctctttgaggccttcgttggaaacgggatttcttcatattatgctagacagaagaattctcagtaacttccttgtgttgtgtgtattcaactcacagagttgaacgatcctttacacagagcagacttgaaacactctttttgtggaatttgcaatttgagattacagccgctttgaggtcaatagtagaaaaggaaatatcttcgtagaaaaactagacagaatgattctcagaaactcctttatgatgtgtgtgttcaactcacagagtttaacctttcttttcatagagcagttagtaaacactctgtttataaagtctgcaagtggatattcagatccctttgtggccttcgttggaaacgggatttcttcatattatgctagacagaagaattcccagtaacttcccttgtgttgtgtgtgttcaactcacagagttgaactttgatttacacagagcagatttgaaacactctttttgtggaatttgcaagtggagatttcaagcgctttgaggccaaaggcagaaaaggaaatatcttcgtataaaaactagacagaatcattctcagaaactgctgcgtgatgtgtgcgttcaactctcagagtttaacttttcttttcattcagcggtttggaaacactctgtttgtaaagtctgcaagtggatattttgaccacttagaggccttcgttggaaacgggtttttttcacgtaaggctagacagaagaattcccagtaacttccttgtgttgtgtgcattcaactcacagagttgaacgttcccttagacagagcagatttgaaacactctatttgtgcaattggcaagtgtagatttcaagcgctttaaggtcaatggcagaaaaggaaatatcgtcgttacaaaactagacagaatgattctcagaaacttctttgtgatgtgtgcgttcaactcacagagtttaacctttcttttcatagagcagttaggaaacagtctgtttgtcaattctgtaagtggatattctgacatcttgtggccttcgttggaaacgggatttcttcatattctgctagacagaagaattctcagtaacttccttgtgttgtgtgtattcaactcacaggagttgaacgatcctttacacagagcagacttgaaacactctttttgtggaatttgcaagtggagatttcagccgctttgaggtcaatggtagaaaaggaaatatcttcgtataaaaactagacagaatgattctcagaaactcctttgtgatgtgtgtgttcaactcacagagtttaacctttcttttcatagagcagttagtaaacactctgtttataaagtctgcaagtggatattcaaacccctttgaggccttcgttggaaacgggatttcttcatattctgctagacagaaggattcccagtaacttccttgtgttgtgtgtgttcaactcacagagttgaactttcatttacaaagagcagatttgaaacactctttttgtggaatttgcaagtggagatttcaagcgctttgaggccaaaggcagaaaaggaaatatcttcgtataaaaactagacagaatcattctcagaaactgctctgcgatgtgtgcgttcaactctcagattttaacttttctattcattcagcagtttggaaacactctgtttgtaacgtctgcacgtggataatttgaccacttagaggccttcgttggaaacgggtttttttcatgtaaggctagacagaagaattctcagtaacttccttgtgttgtgtgcattcaactcaaagagttgaacgttcccttagacagagcagatttgaaacactctacttgtgcaatttgcaagtgtagatttcaagcgctttaaggtcaatgacagaaaaggaaatatcttcgtttcaaaactagacagaatcattcccagaaactgcgttgtcatgtgttcgttcaactcacagagtttaacctttctgttcatagagcagttaggaaacactctgtaaagtttgtaagtggatattctgacatcttgtggccttcgttggaaacgggatttcttcatattctgctagacagaagaattctcagtaacttccttgtgttgtgtgtattcaactcacagagttgaacgatccttttcacagagcagacttgaaacactctttttgtggaatttgcaagtggagatttcagccgctttgaggtcaatggtagaaaaggaaatatcttcgtataaagactagactgaaagattctcagaaactcctttgtgatgtgtgtgttcaactcacagagtttaacatttcttttcgtagtgcagttagtaaacactctgtttataaagtctgcaagtggatattcagacccctttgaggccttcgttggaaacgggatttcttcatattctgctagacagaagaattctcagtaacttccttgtgttgggtgtattcaactgacagagttgaactttcatttagagagagcagatttgaaacactgtttttgtggaatttgcaagtggagatttcaagcgctttggggccaaaggcagaaaaggaaatatcttcgtataaaaactagacagaatcattctcagaaactgctgcgtgatgtgtgcgttcaactctcagagtttaacttttcttttcattcagcggtttggaaacactctgtttgtaaagtctgcacgttgatattttgaccacttagaggccttcgttggaaacgggtttttttcatataaggctagatagaagaattcccagtaacttccttgtgttgtgtgcattcaactcacagagttgaacgttcccttagacagagcagatttgaaacactctatttgtgcaatttgcaagtgtagatttcaagtgtttaaggtcaatggcagaaaaggaaatatcttcgtttcaaaactagacagaatcattcccacaaactgcgttgtgatgtgttctttcaactcacagagtttaacctttctgttcatagagcagttaggaaacactctgtttgtaaagtctgtaagtggatattctgacatcttgtggccttcgttggaaacgggatttcttcatattctgctagacagaagaattctcagtaacttccttgtgttgtgtgtattcaactcacagagttgaacgaccctttacacagagcagacttgtaacactctttttgtggaatttgcaagtggagatttcagccactttgaagtcaaaggtagaaaaggaaataacttcctataaaaactagacagaatgattctcagaaactcctttgtgatgtgtgcgttcaactcacagagtttaacctttcttttcatagagcagttaggaaacactctgtttgtaaagtctgcaagtggatattcagacctctttgaggccttcgttggaaatgggtttttttcatataaggctagacagaagaattcccagtaacttcccttgtgttgtgtgtgttcaactcacagagttgaactttcatttacacagagcagatttgaaacactctttttgtggaatttgcaaatggagatttcaagcgctttgaggccaaaggcagaaaaggaaatatcttcgtataaaaactagacagaatcgttctcagaaactgctctgcgatgtgtgcgttcaactctcagagtttaacttttcttttcattcagcagtttggaaacactctgtttgtaaagtctgcatgtggataatttgaccacttagaggccttcgttggaaacgggtttttttcatgtaaggctagacagaagaattcccaataacttccttgtgttgtgtgcattcaactcacagagttgaacgttcttttagacagagcagatcggaaacaatctttttgtgcaatttgcaggtggagatttcaagcgctttaaggtcaatggcagaaaaagatatatatcttcatttcaaaactagacagaatcattcccacaaactgcgttctgatgtgttcgttcaactcacagagtttaacctttcttttcatagagcagttaggaaacagtctgtttgtcaattctgtaagtggatattctgacatcttgtggccttcgttggaaacgggatttcttcatattctgctagacagaagaattctcagtaacttccgcgtgttgtgtgtattcaactcacagagttgaacgatcctttacacagagcagagttgaaacactctttttgtggaatttgcaagtggagatttcagccgctttgaggtcaatggtagaaaaggaaatatcttcgtataaaaactagacagagatgattctcagaactcctttgtgatgtgtgcgttcaactcacagagtttaacctttcttttcatagagcagttaggaaacactctgtttgtaaagtctgcaagtggatattcagacctctttgaggccttcgttggaaacgggtttttttcctataaggctagacagagaattctcagtaacttccttgtgttgtgtgtattcaactgacagagttgaactttcatttagagagagctgatttgaaacactgtttttgtggaatttgcaagtggagatatcaagcgctttggggccaaaggcagaaaaggaaatatcttcgtataaaaactagacagaatcattctcagaaactgctgcgtgatgtgtgcgttcaactctcagagtttaacttttcttttcattcagcggtttggaaacactctgtttgtaaagactgcacgtggatattttgaccacttagaggccttcgttggaaacgggttttttttcatgtaaggctagacagaagaattcccagtaacttccttgtgttgtgtgcattcaactcacagagttgaacgttcccttagacagagcagatttgaaacactctatttgtgcaatttgcaagtgtagttttcaagctctttaaggtcaacggcagaaaaggaaatatcttcgtttcaaaactagacagaatcattcccagaaactgcgttgtgatgtgttcgttcaactcacagagtttaacctttcttttcatagagcagttaggaaacagtctgtttgtcaattctgtaagtggatattctgacatcttgtggccttcgttggaaacgggatttcttcatattctgctagacagaagaattctcagtaacttccttgtgttgtgtgtattctactcacagagttgaacgatcctttacacagagcagacttgaaacactctttttgtggaatttgcaagtggagatttcagccgctttgaggtcaatggtagaataggaaatatcttcctatagaaactagacagaacgattctcagaaactcctttgtgatgtgtgcgttcaactcacagagtttaacttttcttttcatagagcagttaggaaacactctgtttgtaaagtctgcaagtggatattcagacctctttgaggccttcgttggaaacgggatttcttcatattctgctagacagaagaattctcagtaacttccttgtgttgtgtgtattcaactgacagagttgaactttcatttagagagagcagatttgaaacactgtttttgtggaatttgcaagtggtgacttcaagcgctttggggccaaacgcagaaaaggaaatatcttcgtataaaaactagacagaatcattctcagaaactgctgcgtgatgtgtgcgttcaactctcagactttaacttttcttttcattcagcggtttggaaacactctgtttgtaaagtctgcacgtggatattttgaccacttagaggccttcgttggaaacgggtttttttcatataaggctagacagaagaattcccaggaacttccttgtgttgtgcacattcaactcacagagttgaacgttcccttagacagagcagatttgaaacactctttttgtgcaattggcaagtggtgatttcagccgctttgaggtcaatggtagaaaaggaaatatcttcgtataaaaactagacagaatcattcccacaaactgcgttgtgatgtgttcgttcaactcacagagtttaacctttcttttcatagagcagttaggaaacactctgtttgtaaattctgtaagtggatattctgacatcttttggccttcgttggaaacgggatttcttcatattctgctagacagaagaattctcagaatcttccttgtgttgtgtgtcttcaactcacagagttgaacgttggtttacacagagcagatttgaaacactctttttgtggaatttgcaagtggagatttcagccgctttgaggtcaatggtagaaaaggaaatgtcttcgtataaaaactagacagaatgattctcagaaactcctttgtgatgtgtgcgttcaactcacagagtttaacctttcttttcatagagcagttaggaaacactgtgtttgtaaagtctgcaagtggatattcagacctctttgaggccttcgttggaaacgggattttttcatataaggctagacagaagaattcccagtaacttccttgtgttgtgtttgttcaactcacagagttgaactttcatttacccagagcagatttgaaacactctttttgtggaatttgcaagtggagatttcaagcgctttgaggccaaaggcagaaaaggaaatatcttcgtttcaaaactagacagaatcattctcagaaactgctctgcgatgtgtgcgttcaactctcagagtttaacttttcttttcattcagcagtttggaaacactctgtaaagtctgcacgtggatattttgaccatttagaggctttcgttggaaacgggtttttttcttgtaaggctagacagaagaattcccagtaacttccttgtgttgtgtgcattcaactcacagagttgaacgttcccttagacagagcagatttgaaacactctatttgtgcaatttgcaagtgtagatttcaagcgctttaaggtcaatggcagaaaaggaaatttcttcgttttaaaactagacagaatgattctcagaaaatcttttgtgatgtgtgcgttcaactcacagagtgtaacttttcttctcatagagcagttaggaaacactctgtttgtaaagtctgcaagtggatattcagacctctttgaggtcttcgttggaaacgggatttcttcatattatgctagacagaagaattctcagtaacttccttgtgttgtgtgtattcaactcaccgagttgaacgatcctttacacagagcagacttgaaagactctttttgtggaatttgcaagtggagatttcagccgctttgaggtcaatggcagaaaaggaaatatcttcctatagaaactagacagaatgattctcagaaacttctttgtgatgtgtgcgttcaactcacagagtttaacctttcttttcatggagcagttaggaaacactctgtttgtaaactctgcaagtggatattcagacctctttgaggccttcgttggaaacgggatttcttcatactgtgctagacagaagaattcccagtaacttccttgtgttgtgtgtgttcaactcacagagttgaactttcatttacagagagcagatttgaaacactctttttgtggaatttgcaagtggagatttcaagcgctttgaggccaaaggcagaaaaggaaatatcttcgtataaaaactagacagaatcattctcagaaactgctgcgtgatgtgtgcgttcaactctcagagtttaacttttcttttcattcagcggtttggaaacactctgtttgtaaagtctgcacgtggaaattttgaccacttagaggccttcgttggaaacgggtttttttcatgtaaggctagacagaagaattcccagtaacttcgttgtgttgtgtacattcaactcacagagttgaacgttcccttagacagagcagatttgaaacactctttttgtgcaattggcaagtggagatttcaagcgctttaaggtcaatggcagaaaaggaaatatcttcgtttcaaaactagacagaatcattcccacaaactgcgttgtgatgtgttcgttcaactcacagagtttaacctttcttttcatagagcagttaggaaacactctgttggtaaattctgtaagtggatattctgacatcttgtggccttcgttggaaacgggatttctacatattctgctagacagaagaattctcagaaacttccttgtgttgtgtgttttcaactcacagatttgaacgatgctttacaaagagtagacttgaaacactctttttgtggaatttgcaagtggagatttcagccgctttgaggtcaatggtagaataggaaatatcttcctatagaaactagacagaatgattctcagaaaatcctttgtgatgcgtgcgttcaactcacagagtttaacttttcttttcatagagcagttaggaaacactctgtaaagtctgcaagtggatattgagacccctttgaggccctcgttggaaacgtgatttcttcatattctgctagacagaagaattcccagtaacttccttgtgttgtgtgtgttcaactcacagagttgaacgttcccttagacagaggagatttgaaacactctttttgtggaatttgcaagtggagatttcaagcgctttgaggccaaaggcagaaaaggaaatatcttcgtataaaaactagacagaatcattctcagaaactgctctgtgatgtgtgcgttcaactctcagagtttaacttttcttttcattcagcagtttggaaacactctgtttgtaaagtctgcacgtggataatttgaccacttagaggccttcgttggaaacgggtttttttcatgtaaggctatacagaagaattcccagtaacttccttgtgttgtgtacattcaactcacagagttgaacgttcccttagacagaacagatttgaaacactctttttgtgcaattggcaagtggtgatttcagccgctttgaggtcaatggtagaaaaggaaatatcttcgtataaaaactagacagaatgattctcagacactcctttgtgatgtgtgcgttcaactcacagagtttaacctttcttttcatagagcagttaggaaacactctgtttgtaaagtctgcaagtggatattcagacctctttgaggccttcgttggaaacgggatttcttcatattatgctagacagaagaattctcagtaacttccttttgttgtgtgtattcaactcacagagttgaacgatcctttacacagagcagacttgaaacactctttttgtggaaattgcaagtggagatttcagccgctttgaggtcaatggtaaaaaaggaaatatcttcgtataaaaactagacagaatgattctcagaaactcctttgtgatttgtgtgttcaacccacagagtttaacatttcttttcatagagcagttaggaaacactctgtttgtaaagtctgcaagtggatattcagacctctttgaggccttcgttggaaacgggtttttttcatataaggctagacagaagaattcccagtaacttccttgtgttgtgtgtgttcaactcacagagttgaactttcatttacacagagcagatttgaaacactctttttgtggaatttgcaagtggagatttcaagcgctttgaggccaaaggcagaaaaggaaatatcttcgtttccaaactagacagaatcattctcagaaactgctctgtgatgtgtgcgttcaactctcagagtttaacttttcttttcattcagcagtttggaaacactctgtttctaaagtctgcacgtggataatttgaccacttagaggccttcgttggaaacgggtttttttcatgtaaggctagacagaagaattcccagtaacttccttgtgttgtgtgcattcaactcacagagttgaacgttcccttagacagagcagatttgaaacagcctatttgtgcaatttgcaagtgtagatttcaagctctttaaggtcaacggcagaaaaggaaatatcttcgtttcaaaactagacagaattattcccacaaactgcgatgtgatgtgttcggtcaactcacagagtttaacctttctgttcatagagcagttaggaaacactctgtttgtaaagtctgtaagtggatattatgacatcatgtggccttctttggaaacgggatttcttcatattatgctagacagaagaattctcagtaacttccttgtgttgtgtgtattcaactcacagagttgaaccatcctttacacagagcagacttgaaacactctttttgtggaatttgcaagtggagatttcagccgctttgaggtcaatagtagaaaaggaaatatcttcgtagaaaaactagacagaatgattctcagaaactcctttgtgatgtgggtgttcaactcacagggtttaacctttcttttcatagagcagttaggaaacactctgtttgtaaagtctgcaagtggatattttcacctctttgaggccttcgttggaaacgggttttttttcatgtaaggctagacagaagaattctcagtaacttccttgtgttgtgtgtattcaactgacagagttggactttcatttagagagagcagatttgaaacactgtttttgtggaatttgcaagtggagatttcaagcgctttggggccaaaggcagaaaaggaaatatcttcgtataaaaactagacagaatcattctcagaaactgctgcgtgatgtgtgcgttcaactctcagagtttaacttttcttttcattcagcggtttggaaacactctgtttgtaaagtctgcacgtggatattttgaccacttagaggccttcgttggaaacgggtttttttcatgtaaggctagacagaaggaattcccagtaacttccttgtgttgtgtgcattcaactcacagagttgaacgttcccttagacagagcagatttgaaacactctatttgtgcaatttgcaagtgtagatttcaagcgctttaaagtcaatggcagaaaaggaaatatcttcgtttcaaaactagacagaatcattcccacaaactgcgttgtgatgtgttcgttcaactcacagagtttaacctttcttttcatagagcacttaggaaacagtctgtttgtaaattctgtaagtggatattctgacatacttgtggccttcgttggaaacgggatttcttcatattctgctagacagaataattctcagtaacttccttgtgttgtgtgtattcaactctcagagttgaacgatcctttacagagagcagacttgaaacactctttttgtggaatttgcaagtggagatttcagccgctttgaggtcaatggtagaataggaaatatcttcctatagaaactagacagaatgattctcagaaactcctttgtgatgtgtgcgttcaactcacagagtttaacctttcttttcatagagcagttaggaaacactctgtttgtaaagtctgcaagtggatattcagacctctttgaggccttcgttggaaacgggtttttttcatgtaaggctagacagaagaattcccagtaacttccttgtgttgtgtgtgttcaactcacagagttgaactttcatttacacagagcagatttgaaacactctttttgtggaatttgcaagtggagattacaagcgctttgaggccaaaggcagaaaaggaaatatcttcgtttcaaaactagacagaataattctcagaaactgctgcgtgatgtgtgcgttcaactctcagagtttaacttttcttttcattcagcggtttggaaacactctgtttgtaaagtctgcacgtggatattttggccacttagaggccttcgttggaaacgggtttttttcatgtaaggctagacagaagaattcccagtaacttccttgtgttgtgtgcattcaactcacagagttgaacgttcccttagacagaggagatttgaaacactctatttgtgcaatttgcaagtgtagttttgaagctctttaaggtcaacggcagaaaaggaaatatcttcgtttcaaaactagacagaatcattcccacaaactgcgttgtgatgtgttcgttcaactcacagagtttaacctttctgttcatagagcagttaggaaacactctgttgtaaagtctgtaagtggatattctgacatcttgtggccttcgctggaaacgggatttcttcatattctgctagacagaagaattctcagtaacttccttgtgttgtgtgtattcaactcacagagttgaacgatcctttacacagtgcagacttcaaacactctttttgtggaatttgcaagtggagatttcagccgctttgaggtcaatggtagaaaaggaaactatcttcatataaagactagacagaatgattctcataaactcctttgtgatgtgtgcgttcaactcacagagtttaacctttcttttcatagagcagttaggaaacactctgtttgtaaagtgtgcaagtggatattcagacctccttgaggccttcgttggaaacgggatttcttcatattctgctagacagaagaattctcagtaacttccttgtgttgtgtgtattcaactcacagagttgaacgatcctttacacagagcagacttgaaacactccttttgtggaatttgcaagtggagatttcagccgctttgaggtcaatggtagaaaaggaaactatgttcttacaaagactagacagaatcattctcagaaactgctctgcgatgtctgcgttcaactctcagagtttaacttttcttttcattcagcagtttggaaacactctgtttgtaaagtctgcacgtggatattttgaccacttagaggccttcgttggaaacgggtttttttcctgtaaggctagacagaagaattcccagtaacttccttgtgttgtgtgcattcaactcacagagttgaacgttcccttagacagagcagatttgaaacactctatttgtccaatttgcaagtgtagatttcaagcgctttaaggtcaacggcagaaaaggaaatatcttcgtttcaaaactagacagaatcattcccacaaactgcgttgtgatgtgttcgttcaactcacagagtttaacttttctgttcatagagcagttaggaaacaccctgtttgtaaagtctgcaagtggatattcagacctccttgaggccttcgttggaaacgggatttcttcatattctgctagacagaagaattctcagtaacttccttttgttgtgtgtattcaactcacagagttgaacgatcctttacacagagcagacttgaaacactctttttgtggaatttgcaagtggagatttcagccgctttgagttcaatggtagaataggaaatatctttctatagaaactagacagaatgattctcagaaactcctttgtgatgtgtgcgttcaactcacagagtttaacctttcttttcatagagcagttaggaaacactctgtttgtaaagtctgcaagtggatattcagacatctttgaggctttcgttggaaacgggatttcttcatattctgctagacagaagaattctcagaaacttccttgtgttgtgcgttttcaactcacagagttgaacgatcctttacacagagcagacttgaaacactccttttgtggaatttgcaagtggagatttcagccgctttgaggtcaatgttagaataggaaatatcttcctatagaaactagacagaatcattctcagaaactgctgcgtgatgtgtgcattcaactctcagagtttaacttttcttttcattcagcggtttggaaacactctgtttgtaaagtctgcacgtggaaattttgaccacttagaggccttcgttggaaacgggtttttttcatgtaaggctagacagaagaattcccagtaacttccttgtgttgtgtgcattcaactcacagagttgaacgttcccttagacagagcagatttgaaacactctatttgtgcaatttccaagtgtagatttcaagcgctttaaggtcaacggcagaaaaggaaatatcttcgtttcaaaactagacagaatcattcccacaaactgcgttgtgaggtgttcgttcaactcacagagtttaacctttcttttcatagagcagttaagaaacagtctgtttgtaaattctgtaagtggatattctgacatcttgtggccttcgttggaaacgggatttcttcatattctgctagacagaagaattctcagaatcttccttgtgttgtgtgtattcaactcacacagttgaacgattgtttacacagagcagatttgaaacactccttttgtggaatttgcaagtggagatttcagccgctttgaggtccatggtagaaaaggaaatatcttcgtataaaaactagacagaaggattctcagaaacttcattgtgacgtgtgcgttcaactcacagagtttaacctttcttttcatagagcagttaggaaacactctgtttgtaaagtctgcaagtggatattcagacctctttgaggccttcgttggaaaagggatttcttcatactgtgctagacagaagaattctcagtaacttccttgtgttgtgtgtattcaactgacagagttgtaatttcgtttagagagagcagatttgaaacactgtttttgtggaatttgcaagtggagatttcaagcgctttggggccaaaggcagaaaaggaaatatcttcgtataaaaactagacagagtcattctcagaaactgctgtgtgatgtgtgcgttcaactctcagagtttaacttttcttttcattcagcggtttggaaacactctgtttgtaaagtctgcacgtggaaattttgaccacttagaggccttcgttggaaacgggtttttttcatgtaaggctagacagaagaattcccagtaacttccttgtgttgtgtacattcaactcacagagttgaacgttcccttagacagagcagatttgaaacactctttttgtgcgattggcaagtggagatttcaagcgctttgaggtcaatggcagaaaaggaaatatcttcgtttcaaaactagacagaatgattctcagaaactcctttgtgatgtgtgcgttcaactcacagagtttaacatttcttttcatagagcagttaggaaacactttgtttgtaaactctgcaagtggatattcagacctcattgaggccttctttggaaacgggatttcttcatactatgctagacagaagaattctcagtaacttccttgtgttgtgtgtattcaactcaaagagttgaacgatcctttacacagagcagacttgaaacactctttttgtggaatttgcaattggagatttcagccgcgttgaggtcaatggtagaaaaggaaatatcttcgtataaaaactagacagaatgattctcagaaactcctttgtgatgtgtgtgttcaactcacagagtttaacctttcttttcatagagcagttaggaaacactctgtttgtaaagtctgcaagtggatattcagacctctttggggccttcgttggaaacgggtttttttcatgtaaggctagacagaagaattctcagtaacttccttgtgttgtgtgtattcaactcacagagttgaacgatcctttacacagagcagacttgaaacactctttttgcggaatttgcaagtggagatttcagccgctttgaagtccatggtagaaaaggaaatatcttcgtataaaaactagacagaatcattctcagaaactgctctgcgatgtgtgcgttcaactctcagagtttaacttttcttttcattcagcagtttggaaacactctgtttgtaaagtctgcacgtggatattttgaccatttagaggccttcgttggaaacgggtttttttcttgtaaggctagacagaagaattcccaggaacttccttgtgttatgtacattcaactcacagagttgaacgtttccttagacagagcagatttgaaacactctttttgtgcaattggcaagtggtgatttcacccgctttgaggtcaatggtagaaaaggaaatatcttcgtataaaaactagacataatcattcccacaaactgcgttgtgatgtgttcgttcaactcacagagtttaacctttctgttcatagagcagttaggaaacactctgtttgtaaagtctgtaagtggatattctgacatcttgtggcctacgttggaaacgggatttctccatattctgctagacagaagaattctcagtaacttccttgtgttgtgtgtatttaactcacagagttgaacgatcctttacacagagcagagttgaaacactctttttgtggaatttgcaagtggagatttcagccgctttgaggtcaatggtagaaaaggaaatatcttcgtataaagactagacagaatgattctcagaaactcctttgtgatgtgtgcgttcaacacacagagtttaacttttcttttcatagagacgttagtaaacactctgtttataaagtctgcaagtggatattcagacccctttgaggccttcgttggaaacgggatttcttcatattatgctagacagaagaattccgagtaacttccttgtgttgtgtgtgttcaactcacagagttgaactttcatttacacagaggagatttgaaacactctttttgtggaatttgcaagtggagatttcaagcgctttgaggccaaaggcagaaaaggaaatatcttcgtataaaaactagacagaatcattttcagaaactgctgcgtgatgtgtgcgttcaactctcagagtttaacttttcttttcattcagcggtttggaaacactctgtttgtaaagtctgcacgtggatattttgaccacttagaggctttcgttggaaacgggtttttttcatgtaaggctagacagaagaattcccagtaacttcattgtgttgtgtgcattcaactcacagagttgaacgttcccttagacagagcagatttgaaacactctatttgtgcaatttgcaagtgtagatttcaagcgctttaaggtcaatggcagaaaaggaaatatcttcgtttcaaaactagacagaatgattctcagaacctcctttgtgatgtgtgcgttcaactcacagagtttaacctttcttttcatagagcagttaggaaacactctgtttgtaaagtctgcaagtggatattcagacctccttgaggccttcgttggaaacgggatttcttcatattatgctagacagaataattctcagtaacttccttgtgttgtgtgtattcaactcacagagttgaacgatcctttacacagagcagacttgaaacactctttttgtggaatttgcaagtggagatttcagccgctttgaggttaatggtagaaaaggaaatatcttcgtataaagactagacagaatgattctcagaaactcctttgtgatgtgtgtgttcaactcacagagtttaacctttcttttcatagagcagttaggaaacactctgtttgtaaagtctgcaagtggatattcagccctctttgaggccttcgttggaaacgggtttttttcatataaggctagacagaagaattctcagtaacttccttgtgttgtgtgtattcaactgacagagttgaactttcatttagagagagcagatttgaaacactgtttttgtggaatttgcaagtggagatttcaagcgctttgggccaaaggcagaaaaggaaatatcttcgtataaaaactagacagaatcattctcagaaactgctgcgtgatgtgtgcgttcaactctcagagtttaacttttcttttcattcagcggtttggaaacactctgtttgtaaagtctgcaagtggatattttgaccacttagaggccttcgttggaaacgggtttttttcatgtaaggctagacagaagaattcccagtaacttccttgtgttgtgtgcgttcaactcacagagttgaactttcatttacacagagcagatttgaaacactctttttgtggaatttgcaaatggagatttcaagcgctttgaggccaaaggcagaaaaggaaatgtcttcgtttcaaaactagacagaatcattcccacaaactgcgttgtgatgtgttcgttcaactcacagagtttaacctttctgttcatagagcagttaagaaacactctgtttgtaaagtctgcaagtggatattcagacctcctagaggccttcgttggaaacgggatttcttcatattctgctagacagaagaattctcagtaacttccttgggttgtgtgtattcaactcacagagttgaacgatcctttacacagagcagacttgaaacactctttttgtggaatttgcaagtggagatttcagccgctttgaggtcaatggtagaaaaggaaatatcttcgtataaagactagacattatgattctcataaactcctttgtgatgtgtgcgttcaactcacagtgtttaacctttcttttcatagagcagttaggaaacactctgtttgtaaagtctgcaagtggatattcagacctctttgaggccttcgttggaaacgggatttcttcatattctgctacacagaagaattctcagtaacttcccttgtgttgtgtgtattcaactcagagagttgaacgatcctttacacagagcagacttgaaacactctttttgtggaatttgcaattggagatttcaggcgctttgaggtcaatagtagaaaaggaaatatcttcgtagaaaaactagacagaatcattctcagaaactgctctgcgatgtgtgcgttcaactctcagagtttaacttttcttttcattcagcagtttggaaacactctgtttgtaaagtctgcacgtggatattttgaccacttagaggccttcgttggaaacggttttttttcctgtaaggctagacagaagaattcccagtaacttccttgtgttgtgtacattcaactcacagagttgaacgttcccttagacagagcagatttgaaacactctttgtgcaattggcaagtggagatttcaagcgctttaaggtcaatggcagaaaaggaaatatcttcgtttcaaaactagacagaacgattctcagaaactcctttgtgatgtgtgcgttcaactcacagagtttaacctttcttttcatagagcagttaggaaacactctgtttgtaaagtctgcaagtggatattcagacctctttgaggccttcgttggaaacgggatttcctcatattctgctagacagaagaattctcagtaacttccttgtgttgtgtgtattcaactcacagagttgaacgatcctttacacagagcagacttgaaactctctttttgtggaatttgcaagtggagatttcagccgctttgaggtcaatagtagaaaaggaaatatcttcgtagaaaaactagacagaatgattctcagaaactcctttgtgatgtgtgcgttcaactcacagagtttaacctttcttttcatagagcagttaggaaacactctgtttgaaaagtctgcaagtggatactcagacctccttgaggccttcgttggaaacgggatttcttcatattatgctagacagaagaattctcagtaacttccttgtgttgtgtgtattcaactgacagagtggaacttttatttagagagagcagatttgaaacactgtttttgtggaatttgcaagtggagatttcaagcgctatggggccaaaggcagaaaaggaaatatctttgtataaaaactagacagaatcattctcagaaactgctctgtgatgtgtgcgatcaactctcagagtttaacttttcttttcattcagcagtttggaaacactctgtttgtaaagtctgcacgtggataatttgaccacttagaggccttcattggaaacgggtttttttcatgtaaggctagacagaagagttctcagtaacttccttgtgttgtgtgtattcaactcacacagttgaacgatcctttacagagagcagacttgtaacactctttttgtggaatttgcaagtggagatttcagccgctttgaagtcaaagtagaaaaggaaatatctgcctataaaaactagacagaatcattcccacaaactgcgttgtgatgtgttcgttcaactcacagagtttaacctttgttttcatagagcagttaggaaacactctgtttgtaaagtctgtaagtggatattctgacatcttgtggccttcgttggaaacgggatttcttcatattctgctagacagagaattctcagtaacttccttgtgttgtgtgtattcaactcacagagttgaacgatcctttacacagagcagacttgaaacactctttttgtggaatttgcaagtggagatttcagccgctttgaggtcaatggtagaataggaaatatcttcctatagaaactagacagaatgattctcagaaactactttgtgatgtgtgcgttcaactcacagagtttaacctttcttttcatagagcagttaggaaacactctgtttgtaaagtctgcaagtggatattcagacctctttgaggccttcgttggaaacgggatttcttcatattctgctagacagaagaattcccagtaacttccttgtgttgtgtgtgttcaactcacggagttgaactttgatttacacagagcagatttgaaacactctttttgtggaatttgcaagtggagatttcaagcgctttgaggccaaaggcaggaaagggaatatcttcatataaaaactagacagaatcattctcagaaactgctctgcgatgtgtgcgttcaactctcagagtttaacttttcttttcattcagcagtttggaaacactctgtaaagtctgcacgtggatattttgaccacttaaaggcgttcgttggaaacgggtttttttcctgtaaggctagacagaagaattcccagtaacttccttgtgttgtgtacattcaactcacagagttgaacgttcccttagacagagcagatttgaaacactctttttgtgcaattggcaagtggagatttcaagcgctttgaggtcaatggcagaaaaggaaatatcttcgtttcaaaactagacagaatcattcccacaaactgcgttgtgatgtgttcgttcaactcacagtttaacctttctgttcatagagcagttaggaaacactctgtttgtaaagtctgtaagtggatattctgacatcttgtggccttcgttggaaacgggatttcttcatattctgctagacagaagaattctcagtaacttccttttgttgtgtgtattcaactcacagagttgaacgatcctttacacagagcagacttgaaacactctttttgtggaatttccaagtggagatttcagccgctttgaggtcaatggtagaataggaaatatcttcgtagaaaaactagacagaatgattctcagaaactcctttgtgatgtgtgcgttcaactcacagagtttaacctttcttttcatagagcagttaggaaacactctgtttgtaaagtctgcaagtggatattcagacctctttgaggccttcgttggaaacgggtttttttcatataaggttagacagaagaattcccagtaacttccttgtgttgtgtgtgttcaactcacagagttgaactttcatttacacagagcagatttgaaacactcttttagtggaatttgcaaatggagatttcaagcgctttgaggccaaaggcagaaaaggaaatatcttcgtataaaaactagacagaatcattctcagaaactgctgcgtgatgtgtgcgttcaactctcagagtttaacttttcttttcattcagcggtttggaaacactctgtttgtaaagtctgcacgtggatattttgacaacttagaggccttcgttggaaacgggtttttttcatgtaaggctagacagaagaattctcagtaacttccttgtgttgtgtgtattcaactcacagagttgaacgatcctttacacagagcagacttgtaacactctttttgtggaatttgcaagtggagatttcagccgctttcaagtcaaaggtcgaaaaggaaatatcttcctataaaaactagacagaatgattctcagaaactcctttgtgatgtgtgcgttcaactcacagagtttaacctttctgttcatagagctgttaggaaacactctgtttgtaaagtctgcaagtggatattcagaactccttgaggccttcgttggaaacgggatttcttcatattctgctagacagaagaattctcagtaacttccttgtgttgtgtgtattcaactcacagagttgaacaatcctttacacagagcagacttgaaacactctttttgtggaatttgcaagtggagatttcagccgctttgaggtcaatggtagaaaaggaaacatctccgtataaagactagacagaatgattctcagaaactcctttgtgatgtgtgcgttcaactcaaagagtttaacctttcttttcatagagcagttaggaaacactctgtttgtaaagtctgcaagtggatattcagacatccttgaggctttctttggaaacgggatttcttcatattctgctagaaagaagaattctcagaaacttccttgtgttgtgtgttttcaactcacagagatgaacgatcctttacacagagcagacttgaaacactccttttgtggaatttgcaagtggagatttcagccgctttgaggtcaatggtagaataggaaatatcttcctatagaaagtagacagaatcattctcagaaactgctctgcgatgtgtgcgttcaactctcagagtttaacttttcttttcattcagcagtttggaaacactctgtttgtaaagtctgcacgttgataatttgaccacttagaggccttcgttggaaacgggtttttttcatataaggctagacagaagaattcccagtaacttccttgtgttgtgtgtattcaactcacagagttgaacgatcctttacacagagcagacttgtaacactctttttctggaatttgcaagtggagatttcagcctctttgaagtcaaaggtagaaaaggaaatatcttcctataaaaactagacagaacgattctcagaaactcctttgtgatgtgtgcgttcaactcacagagtttaacctttcttttcatagagcagttaggaaacactctgtttgtaaagtctgcaagtggatattcagacctccctgaggccttcgttggaaacgggatttcttcatattctgctacacagaagaattctcagtaacttcgttgtgttgtgtgtattcaactcacagagttgaacgatcctttacacagagcagacttgaaacactctttttgtggaatttgcaagtggagatttcagccgctttgaggtcaaaggtagaaaaggaaatatcttcgtataaagactagacagaatgattctcagaaactcctttgtgatgtgtgcgttcaactcacagagtttaacctttcttttcatagagcagttaggaaacactctgattgtaaagtctgcaagtggatattcagacctccttgaggccttcgttggaaacgggatttcttcatattctgctagacagaagaattctcagtaacttccttgtgttgtgtgtattcaactcacagagttgaacgatcctttacacagagcagacttgaaacactctttttgtggaatttgcaagtggagatttcagccgctctgaggtcaatggtagaataggaaatatcttcctatagaaaatagacagaatcattctcagaaactgctctgtgatgtgtgcgttcaactctcagagtttaacttttcttttcattcagcagtgtggaaaaactctgtttgtaaagtctgcacgtggatattctgaccacttagaggccttcgttggaaacgggtttttttcctgtaaggctagacagaagaattcccagtaacttccctgtgttgtgtacattcaactcacagagttgaacgttcccttagacagagcagatttgaaacacactttttgtgcaattggcaaatggagatttcaagcgctttaagttcaatggcagaaaaggaaatatcttcgtttcaaaactagacagaatcattcccacaaactgcgttgtgatgtgttcgttcaactcacagagtttaacatttctgttcatagagcagttaggaaacactctgtttgtaaagtctgcaagtggatattcagacctccttgaggccttcgttggaaacgggatttcttcttattctgctagacagaagaattcccagtaacttccttgtgttgtgtgtattcaactcacagagttgaatgatcctttacacagagaggacttgaaacactctttttgtggaatttgcaagtggagatttcagccgctttgaagtcaaaggtagaaaaggaaatatcttcgtataaaaactagacagaatgattctcagaaactcctttgtgatgtgtgcgttcaactcacagagtttaacctttcttttcttagagcagttaggaaacactctgtttgtaatgtctgcaagtggatattcatacctcctttaggccttcgttggaaacgggtttttttcatataaggctagacagaagaattctcagtaacttaccttgtgttgtgtgtattcaactgacagagttgaactttcatttagagagagcagatttgaaacactgtttttgtggaatttgcaagtggagatttcaagcgctttgcggccaaaggcagaaaaggaaatatcttcgtataaaaactagacagaatcattctcagaaactactgcgtgatgtgtgcgttcaactctcagagtttaacttttcttttcattcagcggtttggaaacactttgtttgtaaagtctgcacgtggatattttgaccacctagaggccttcgttggaaacgggtttttttcatgtaaggctagacagaagaattcccagtaacttccttgtgttgtgtacattcaactcacagagttgaacgatcccttagacagagcagatttgaaacactctttttgtggaatttgcaaatggagatttcaagcgctttgaggccaaaggcagaaaaggaaatatcttcgtataaaaactagacagaatcattcccacaaactgcgttgtgatgtgttcgttcaactcacagagtttaacctttctgttcatagagcagttaggaaacactctgtttgtaaagtctgcaagtggatattcagacctccttgaggccttcgttggaaacggtatttcttaatattctgctagacagaagaattctcagtaacttccttgtgttgtgtgtattcaactcacagagttgaacgatcctttacacagagcagacttgaaacactctttttgtggaattcgcaagtggatatttcagccgctttgaggtcaatggtagaataggaaatatcttcctatagaaactagacagaatgattctcagaaactcctttgtgatgtgtgcgttcaactcacagagttcaacttttcttttcatagagcagttaggaaacactctgtttgtaaagtctgcaagtggatattcagacctctttgaggccttcgttggaagcgggatttcttcatattatgctagacagaagaattctcagtaacttccttgtgttgtgtgtattcaactaacagagttgaactttcatttagagagagcagatttgaaacactgtttttgtggaatttgcaagtggagatttcaagcgctttggggccaaaggcagaaaaggaaatatcttcgtataaaaactagacagaatcattctcacaaactgctctgcgatgtgtgcgttcaactctcagagtttaacttttcttttcattcagcagtttggaaacactctgtttgtaaagtctgcacgtggatattttgaccacttagaggccttcgttggaaacgggtttttttcctgtaaggctagacagaagaattcccagtaacttcccttgtgttgtgtacattgaactcacagagttgaacgttcccttagacagagcagatttgaaacactctttttgtgcaattggcaagtggagatttcaagcgctttaaggtcaatggcagaaaaggaaatatcttcgtttcaaaactagacagaatcattcccacaaactgtattgtgatgtgttcgttcaactcacagagtttaacctttcttttcatagagcagttaggaaacagtctgtttgtaaattctgtaagtggatattctgacatcttgtggccttcgttggaaacgggatttcttcatattctgctagtcagaagaattctcagtaacttccttgtgttgtgtgttttcaactcacagagttgaacgatcctttacacagagcagacttgaaacactctttttttggaatttgaaagtggagatttcagccgctttgaggtcaatggtagaaaaggaaactatcttcgtataaagactagacagaatgattctcagaaactcctttgtgatgtgtgcgttcaactcacagagtttaacctttcttttcatagagcagttaggaaacactctgtttgtaaagtctgcaagtggatattcagacctctttgaggccatcgttggaaacgggatttgttcatattctgctagagagaagaatccccagtaacttccttgtgttgtgtgtgttcaactcacagagttgaactttcatttacacagagcagatttgaaacactctttttgtggaatttgcaagtggagatttcaagcgctttgaggccaaaggcagaaaaggaaatatcttcgtttcaaaactagacagaatcattctcagaaactgctgcgtgatgtgtgcgttcaactctcagagtttaacttttccttttcattcagcggtttggaaacactctgtttgtaaagtctgcacgtggatattttgaccacttagaggccttcgttggaaacgggtttttttcatgtaaggctagacagaagaattctcagtaacttccttgtgttgtgtgtattcaactcacagagttgaacgatcctttacacagagcagaacgatcctttacacagagcagacttgaaacattctttttgtggaatttgcaagtggagatttcaaccgctttgaggtcaatggtagaataggaaatatcttcctatagaaactagacagaacgattctcagaaactcctttctgatgtgtgcgttcaactcacagagtttaacctttcttttcatatagcagttaggaaacactctgtttgtaaagtctgcaagtggatattcagacctctttgaggccttcgttggaaacgggatttcttcatattctgctagacagaataattctcaataacttccttgtgttgcgtgtattcaactcttagagttgaacgatcctttacagagagcagacttgaaacactctttttgtggaatttgcaagtggagatttcagccgctttgaggtcaatggtagaataggaaatatcttcctatagaaactagacagaatgattctcataaactcctttgtgatgtgtgcgttcaactcacaaagtttaacttttcttttcatagagcagttaggaaacactctgtttgtaaagtctgcaagtggatattcagacctctttgaggccttcgttggaaacgggatttcttcatattatgctagacagaagaattctcagtaacttccttgtgttgtgtgtattcaactcacagagttgaacgatcctttacacagagcagacttgaaacattctttttgtggaatttgcaactggagatttcagccgcttagaggtcaatggtagtataggaaatatcttcctatagaaactagacacaatcattctcagaaagtgctctgcgatgtgtgcgttcaactctcagagtttaactttgcttttcattcagcagtttggaaacactctgtttgtaaagtctgcacgtggataatttgaccacttagaggccttcgttggaaacgggtttttttcatgtaaggctagacagaataattcccagtaacttccttgtgttgtgtacattcaactcacagagatgaacgttcccttagacagagcagatttgaaacactctttttgtgcaattgacaagtggagatttcaagcgctttaaggtcactggcagaaaaggaaatatcttcgtttcaaatgtagacagaatgattcccacaaactgcgttgtgatgtgttcgttcaactcacagagtttaacctttcttttcatagagcagttaggaaacactctgtttgtaaattctgcaagtggatattcagacctctttgaggccttcgttgcaaacgggatttcttcatattatgcctgacagaagaattctcagtaacttccttgtgttgtgtgtattcaactcacagagttgaacgatcctttacacagagcagacttgaaactctctttttgtggaatttgcaagtggagatttcagccgctttgagttcaatggtagaataggaaatatcttcctatagaaactagacagaatgattctcagaaactcctttgtgatgtgtgcgttcaactcacagtagtttaacgtttcttttcatagagcagttaggaaacactctgtttctaaagtatgcaagtggatattcagacctctttgaggccttcgttggaaacgggtttttttcatataaggctagagagaagaattctcagtaacttccttgtgttgtgtgtattcaactgacagagttgaactttcatttagagagagctgatttgaaacactgtttttgtggaatttgcaagtggagatttcaagcgctttggggccaaaggcagaaaaggaaatatcttcgtataaaaactagacagaatcattctcagaaactgctgcatgatgtgtgcgttcaactctcagagtttaacttttcttttcattcagcggtttggaaacactctgtttgtaaagtctgcacgtggatattttgaccacttagaggccttcgttggaaacgggttttttttcatgtaaggctagacagaagaattcccagtaacttccttgtgttgtgtacattcaactcacagagttgaacgttcccttagacagagcagatttgaaacactctttttgtgcaattggcaagtggagatttcaagcgctttgaggtcaatggcagaaaaggaaatatcttcgtttcaaaactagacagaatgattctcagaaactcctttgtgatgtgtgcgttcatctcacagagtttaacttttcttttcatagagcagttaggaaacactctgtttgtaaagtctgcaagtggatattcagacctctttgaggccttcgttggaaacgggattcttcatattatgctagacagaataattctcagtaacttccttgtgttgtgtgtattcaactcacagagatgaacgatcctttacagagagcagacttgaaacactctttttgtggaatttgcaagtggagatttcagccgctttgaggtcaatggtagaaaaggaaatatcttcgtataaagactagacagaatgattctcagaaactcctttctgatgtgtgtgttcaactcacagagtttaacctttcttttcatagagcagttagtaaacagtctgtttataaagtctgcaagtggatattcagacccctttgaggccttcgttggaaacgggatttcttcatattatgctagacagaagaattcccagtaacttccttgtgttgtctgtgttcaactcacggagttgagctttcatttacacagagcagatttgaaacactctttttgtggaatttgcaagtggagatttcaagcgctttgaggccaaaggcagaaaaggaaatatcttcgtataaaatctagacagaatcattctcagaaactgctctgtgatgtgtgcgttcaactctcagagtttaacttttcttttcattcagcagtttggaaacactctgtttgtaaagtctgcacgtggatattttgaccacttagaggccttcgttggaaacgggttttcttcatgtaaggctagacagaagaattcccagtaacttccttgtgttgtgtgcattcaactcacagagttgaacgttcccttagacagagcagatttgaaacagcctatttgtgcaatttgcaagtgtagatttcaagcgctttaaggtcaacggcagaaaaggaaatatcttcctttcaaaactagacagaatcattcccacaaactgcgttgtgatgtgttcgttcaactcacagggtttaacctttctgttcatagagcagttaggaaacactctgtttgtaaagtctgcaagtggatattcagacctccttgaggccttcgttggaaacgggatttcttcatattctgctagacagaagaattctcagtaacttccttgtgttgtgtgtattcaactcacagagttgaacgatcctttacacagagcagacttgaaacactctttttgtggaatttgcaagtggagatttcagccgctttgagttcaatggtagaataggaaatatcatcctatagaaactagacagaatgattctcagaaactcctttgtgatgtgtgcgttcaactcacagagtttaacctttcttttcatagagcagttaggaaacactctgtttgtaaagtctgcaagtggatattcagacctctttgaggtcttcgttggaaacgggtttttttcatataaggctagacagaagaattcccagtaacttcccttgtgttgtgtgtgttcaactctgtgagttgaactttcatttacacagagcagattggaaacactctttttgtggaatttgcaagtggagatttcaagcgctttgaggccaaaggcagaaaaggaaatatcttcgtataaaaactagacagaatcattctcagaaactgctctgcgatgtgtgcgttcaactctcagagtttaacttttgttttcattcagcagtttggaaacactctgtttgtaaagtctgcacgtggatattttgagcacttagaggccttcgttggaaacgggtttttatcctgtaaggctagacagaagaattcccagtaacttccttgtgttgtgtacattcaactcacagagttgaacgttcccttagacagagcagatttgaaacactctttttgtgcaattggcaagtggagatttcaagcgctttaaggtcaatggcagaaaaggaaatatcttcgtttcaaaactagacagaatgattctcagaaactcctttgtgatgtgtgcgttcaactcacagagtttaacttttcttttcatagagcagttaggaaacactctgtttgtaaagtctgcaagtggatattcagacctctttgaggctttcgttggaaacgggatttcttcatattctgctagacagaagaattctcagaatcttccttgtgttgtgtgtattcaactcacagagttgaacgatcctttacacagagcagacttgtaacactctttttgtggaatttgcaagtggagatttcagccgctttgaggtccatggtagaaaaggaaatatcttcgtataaaaactagacagaatgattctcagaaactcctttgtgatgtgtgcgttcaactcacagagtttaacctttcttttcatagagcagttaggaaacactctgtttgtaaagtctgcaagtggatattcagacctccttgaggccttcgttggaaacgggttttgttcatattatgctagacagaagagttctcagtaacttccttgtgttgtgtgtattcaactcacacagttgaactttcatttacacagagcagatttgaaacactctttttgtggaatttgcaggtggagatttcaagcgctttgaggccaaaggcagaaaaggaaatatcttcgtataaaaactagacagaatgattctcagaaacttctttgtgatgagtgcgttcaactcacagagtttaacctttcttttcatcgagtagttaggaaacactctgtttgtaaagtctgcaagtggatattttgacctctttgaggctttcgttggaaacgggtttttttcctgtaaggctagacagaagaattcccagtaacttccttgtgttgtgtacattcaactcacagagttgaacgttcccttagacagagcagatttgaaacactctttttgtgcaattggcaagtggagatttcaagcgctttaaggtcaatggcagaaaaggaaatatcttcgtttcaaaactagacagaatgattctcagaaactcctttgtgatgtgtgcgttgaactcacagagtttaacctttctgttcatagagcagttaggaaacactctgtttgtaaagtctgtaagtggatattctgacatcttgtggccttcgttggaaacgggatttcttcatattctgctagacagaagaattctcagtaacttccttgtgttgtgtgtattcaactcacagagttgaacaatcctttacacagagcagacttgaaacactctttttgtggaatttgcaagtggagatttcagccgctttgaggtcaatggtagaaaaggaaactatcttcatataaagacttgacagaatgattctcagaaactcctttgtgatatgtgcgttcaactcacagagtttaacctttcttttcatagagcagttaggaaacactctgtttgtaaaatctgcatgtggatatttggacttctttgaggccttcgttggaaacgggtttttttcatgtaaggctagacagaagaattcccagtaacttccttgtgttgtgtgtgttcaactcacagagttgaactttgatttacacagagcagatttgaaacactctttttgtggaatttgcaaatggagatttcaagcgctttgaggccaaaggcagaaaaggaaatatctttgtataaaaactagacagaatgattctcagaaactcctttgtgatgtgtgcgttcaactcacagagttcaacctttcttttcatagagcagttgggaaacactctgttagtaaagtctgctagtggatattcagacctctttgaggccttcgttggaagcgggatttcttcatattctgctagacaaaagaattctcagtaacttccttgtgttgtgtgtattcaactcacagaattgaacgatcctttacacagagcagacttcaaacactctttttgtggaatttgcaagtggagatttcagccgctttgaggtcaatggtagaaaaggaaatatcttcgtataaaaactagacagaatgattctcagaaactcctttgtgatgtgtgcgttcaactcacagagtttaacctttcttttcatagagcagttaggaaacactctgtttgtaaagtctgcaagttgatattcagacctccttgaggccttcgttggaaacgggatttcttcatattatgctagacagaagaattctcagtaacttccttgtgttgtgtgtattcaactcacagagttgaacgatcctttacacagagcagacttgaaacactctttttgtggaatttgcaagtggagatttcagccgctttgaggtcaatggtagaaaaggaaatatcttcgtataaaaacgagacagaatgattctcagaaacttctttgtgatgtgtgcgttcaactcacagagtttaacctttctgttcatagtgcagttaggaaacactctgtttgtaaactctgcaagtggatattcagacctctttgaggccttcgatggaaacgggatttctccatactgtgctagacagaagaattcccagtaacttccttgtgttgtgtgtgttcaactcacagagttgaactttcatttacacagagcagatttgaaacactctttttgtggaatttgcaagtggagatttcaagcggtttgaggccaaaggtagaaaaggaaatatcttcgtttcaaaactagacagaatcattctcagaaactgctctgcgatgtgtgcgttcaactctcagagtttaacttttcttttcattcagcagtttggaaacactctgtttgtaaattctgcacgtggatattttgaccacttagaggccttcgttggaaacgggtttttttcctgtaaggctagacagaagaaatcccagtaacttccttgtgttgtgtgcattcaactcacagagttgaacgttcccttagacagagcagatttgaaacactctatttgtgcaatttccaagtgtagatttgaagcgctttaaggtcaacggcagaaaaggaaatatcttcgtttcaaaactagacagaaatcattctcataaactgctctgcgatgtgtgcgttcaactctcagagtttaacttttcttctcattcagcagtttggaaacactctgtttgtaaagtctgcacgtggataatttgaccacttagaggccttcgttggaaacgggtttttttcatgtaaggctagacagaagaattctcagtaacttccttgtgttgtgtgtattcaactcacagagttgaacgatcctttacacagagcagacttgtaacactctttttgtggaatttgcaagtggagatttcagccgctttgaagtctaaggtagaaaaggaaatatcttcctataaaaactagacagaatgattctcagaaactcctttgtgatgtgtgcgttcaactcacagagtttaacctttcttttcatagagcagttaggaaacactctgtttgtaaagtctccaagtggatattcagacctctttgaggccttcgttggaaacgggtttttttcatataaggctagacagaagaattcccagtaacttccttgtgttgtgtgtgttcaactcacagagttgaactttcgtttacacagagcagatttgaaacactctttttgtggaatttgcaaatggagatttcaagcgctttgaggccaaaggcagaaaaggaaatatcttcgtataaaaactagacagaatcattctcagaaactgctgcgtgatgtgtgcgttcaactctcagaatttaacttttcttttcattcagcggtttggaaacactctgtttgtaaagtctgcacgtggaaattttgaccacttagaggccttcgttggaaacgggtttttttcatgtaaggctagacagaagaattcccagtaacttccttgtgttgtgtgcattcaactcacagagttgaacgttcccttagacagagcagatttgaaacactctatttgtgcaatttgcaagtgtagatttcaagcgctttaaggtcaatggcagaaaaggaaatatcttcgtttcaaaactagagagaatgattctcagaaactcctttgtgatgtgtgcgttcaactcacagagtttaacctttcttttcatagagcagttaggaaacactctgttggtaaagtctgcaagtggatattcagacctctttgaggccttcgttggaagcgggatttcttcatgttctgctagacagaagaattctcagaaacttccttgtgttgtgtgttttcaactcacagagttgaacgatgctttacacagagtagacttgaaacactctttttgtgtaatttgcaagtggagatttcatccgctttgaggtcaatggtagaaaaggaaatatcttcgtataaaaactagacagaatgattctcagaaactcctttgtgatgtgtgtgttcaactcacagagtttaacgtttcttttcatagagcagttagtaaacactctgtttataaagtctgcaagtggatattcagacccctttgaggccttcgttggaaacgggatttcatcatattatgctagacagaagaattctcagtaacttccttgtgttgtgtgtattcaactgacagagttgaactttcatttagagagagcagatttgaaacactgtttttgtggaatttgcaagtggagatttcaagcgctttggggccaaaggcagaaaaggagatatcttcgtataaaaactagacagaatgattctcagaaactcctttgtgatgtgtgcgttcaactctcagagtttaacttttcttttcattcagcagtttggaaacactctgtttgtaaagtctgcacgtggatattttgaccacttagaggccttcgttggaaacgggtttttttacctgtaaggctagacagaagaattcccagtaacttccttgtgttgtgtgcattcaactcacagagatgaacgttcccttagacagagcagatttgaaacactctatttgtgtaatttgcaagtgtagatttcaagcgctttaaggtcaatggcagaaaaggaaatatctccgtttcaaaactagacagaatcattcccacaaactgcgttgtgatgtgttcgttcaactcacagagtttaacctttccgttcatagagcagttaggaaacacactgtttgtaaagtctgtaagtggatattctgacatcttgtggccttcgttggaaacgggatttcttcatattctgctagacagaagaattctcagtaacttccttgtgttgtgtgtattcaactcacagagttgaacgatcctttacacagagcagacttgtaacactctttttgtggaatttgcaattggagatttcagccgctttgaagtcaaaggtagaaaaggaaatatcttcctataaaaactagacagaatgattctcagaaactcctttgtgatgtgtgcgttcaactcacagagtttaacctttcttttcatagagcagttaggaaacactctgtttgtaaagtctgcaagtggatattcagacctctttgaggccttcgttggaaatgggtttttttcatataaggctagagagaagaattctcagtaacttccttgtgttgtgtgtattcaactgacagagttgaactttcatttagagagagcagatttgaaacactgtttttgtggaatttgcaagtggagatttcaagcgctttggggccaaaggcagaaaacgaaatatcttcgtataaaaactagacagaatcattctcagaaactgctctgcgatgtgtgcgttcaactctcagagtttaactttgcttttcattcagcagtttggaaacactctgtttgtaaagtctgcacgtggatattttgaccacttagaggccttcgttggaaacgtgtttttttcctgtaaggctagacagaagaattcccagtaacttccttgtgttgtgtacattcaactcacagagttgaacgttcccttagacagagcagatttgaaacactctttttgtgcaattggcaagtggagatttcaagcgctttaaggtcaatggcagaaaaggaaatatcttcgtttcaaactagacagaatcattctcagaaactgctctgtgatgtgtgcgttcaactctcagagtttaaattttcttctcattcagcagtttggaaacactctgtttgtaaagtctgcacgtggataatttgaccacttagaggccttcgttggaaacgggtttttttcatgtaaggctagacagaagaattctcagtaacttccttgtgttgtgtgtattcaactcacagagttgaaagaccctttacacagagcagacttgaaacactctttttgtggaatttgcaagtggagatttcagccgctttgaagtcaaaggtagaaaaggaaatatcttcgtataaaaactagatagaatgattctcataaactcctttgtgatgtgtgcgttcaactcacagagtttaacctttcttttcatagagcagttaggaaacactctgtttgtaaagtctgcaagtggatattcagacctctttgaggccttcgttggaaactggatttcttcatattctgctagacagaagaattcccagtaacttccttgtgttgtgtgtgttcaactcacagagttgaactttcatttacacagagcagatttgaaacactctttttgtggaatttgcaaatggagatttcaagcgctttgaggccaaaggcagaaaaggaaatatcttagtataaaaactagacagaatgattctcagaaactgctctgtgatgtgtgcgttcaactctcagagtttaacttttcttttcattcagcagtttggaaacactctgtttgtaaagtctgcacgtggataatttgaccacttagaggccttcgttggaaacgggtttttttcaagtaaggctagacagaagaattcccagtaacttccttgtgttgtgtgcattcaactcacagagttgaacgttcccttagacagagcagatttgaaacactctatttgtgcaatttgcaagtgtagatttcaagcgctttaaggtcaacggcagaaaaggaaatatcttcgtttcaaaactagacagaatcattcccacaaactgcgttgtgatgtgttcgttcaactcacagagtttaacctttcttttcatagagcagttaggaaacagtctgtttgtcaattctgtaagtggatattctgacatcttgtggcctttgttggaaacgggatttcttcatattctgctagacagaagaattctcagaatcttccttgtgttgtgtgtattcaactcacagagtttaacgatcctttacacagagcagacttgaaacactctttttgtggaatttgcaagtggagatttcagccgctttgaggtccatggtagaaaaggaaatatcttcgtataaaaactagacagaatgattctcagaaactcctttgtgatgtgtgcgttcaactcacacagtttaacctttcttttcatagagcagttgggaaacactctgtttgtaaaatctgcaagtggatattcagacctccttgcggccttcgttggaaacgggatttcttcatattatgctagacagaataattctcagtaacttccttgtgttgtgtgtattcaactcacggagttgaacgatcctttacacagagcagacttgaaacactctttttgtggaatttgcaagtggagatttcagccgctttgaagtcaatggtagaataggaaatatcttcctatagaaactaggcagaatcattctcagaaactgctgcgtgatgtgtgcgttcaactctcagagtttaacttttcttttcattcagcggtttggaaacactctgtttgtaaagtctgcacgtggatattttgaccacttagaggccttcgttggaaacgggtttttttcatgtaaggctagacagaagaattcccagtaacttccttgtgttgtgtgcattcaactcacagagttgaacgttccctgagacagagcagatttgaaacactctatttgtgcaatttgcaagtgtagatttcaagcgctttaaggtcaacggcagaaaaggaaatatcttcgtttcagaactagacagaatcattcccacaaactgcgttgtgatgtgttcgttcaactcacagcagtttaacctttctgttcatagagcagttaggaaacactctgtttgtaatgtctgtaagtggatattctgacatcttgtggccttcgttggaaacgggatttcttcatattctgctagacagaagaattctcagtaacttccttgcgttgtgtttattcaactcacagagttgaatgatcctttacacagagcagacttgaaacactctttttgtggaatttgcaagtggagatttcagccgctttgaggtcaatggtagaaaagtaaatatcttcgtataaggactagacagaatgattctcagaaactcctttgtgatgtgtgcgttcaactcacagagttcaacctttcttttcatagagcagttgggaaacactctgtttgtaatgtctgcaagtggatattcagacttctttgaggccttcgttggaagcgggatttcttcatattctgctagacagaagaattcccagtaacttccttgtgttgtgtgtgttcaactcacagagttgaactttcatttacccagagcagatttgaaacactctttttgtggaatttgcaagtggagatttcaagcgctttgagcccaaaggcagaaaaggaaatatcttcgtttcaaaactagacagaatcattctcagaaactgctgcgtgatgtgtgcgttcaactctcagagtttaacttttcttttcattcagcggtttggaaacactctgtttgtaaagtctgcacgtggaaattttgaccacttagagaccttcattggaaacgggtttttttcatgtaaggctagacagaagaattcccagtaacttccttgtgttgtgtacattcaactcacagagttgaacgttcccttagacagagcagatttgaaacactctttttgtgcaattggcaagtggagatttcaagcgctttaaggtcaatggcagaaaaggaaatatcttcgtttcaaaactagacagaatgattctcagaaactcctttgtgatgtgtgcgttcaactcacagagtttaacctttcttttcatagagcagttaggaaacactctgtttgtaaagtctgcaagtggatattcagacctccttgagtccttcgttggaaacgggatttcttcatattatgctagacagaagaattctcagtaacttccttgtgttgtgtgtattcaactcacagagttgaacgatcctttacacagagcagacttgaaacactctttttgtggaatttgcaagtggagatttcagccgctttgaggtcaattgtagaataggaaatatcttcctatagaaactagacagaatgattctcagaaactcctttgtgatgtgtgcgttcaactcacagagttcaacctttcttttcatagagcagttgggaaacactctgtttgtaaagtctgcaagtggatattcagacttcttagaggccttcgttggaagcgggatttcttcatattctgctagacagaagaattcccagtaacttccttgtgttgtgtgtgttcaactcacagagttgaactttcatttacacagagcagatttgaaacactctttttgtggaatttgcaagtggagatttcaagcgctttgaggccaaaggcaggaaaggaaatatcttcgtataaaaactagacagaatcattctcagaaactgctctgcgatgtgtgcgttgaactctcagagtttaacttttcttttcattcagcaatttggaaacactctgtttgtaaagtctgcacgtggatattttgaccacttagaggccttcgttggaaacgggtttttttcctgtaaggctagacagaagaattctcagtaacttccttgtgttgtgtgtattcaactcacagagttgaacgatcctttacacagagcagacttgtaacactctttttctggaatttgcaagtggagatttcagccgctttgaagtcaaaggtagaaaaggaaataacttcctataaaaactagacagaatgattctcagaaacttctttgtgatgtgtgcgttcaactcacagagtttaacctttcttttcatagagcagttaggaaacactctgtttgtaaactctgcaagtggatattcagacctctttgaggccttcgttgcaaacgggatttcttcatgctatgctagacagaagaattctcactaacttccttgtgttttgtgtattcaactcacagagttgaacgatcctttacacagagcagacttgaaacactctttttgtggaatttgcaagtggagatttcagccgctttgaggtcaatggtagaaaaggaaatatcttcgtataaagactagacagatagattctcagaaactcctttgtgatgtgtgcgttcaactcacagagtttaacctttcttttcatagagcagttaggaaacactctgtttgtaaagtctgcaagtggatattcagacctctttgaggccatcgttggaaacgggtttttttcatataaggctagacagaagaattcccagtaacttccttgtgttgtgtgtgttcaactcacagagttgaactttcatttacacagagcagattggaaacactctttttgtggaatttgcaaatggagatttcaagcgctttgaggccaaaggcagaaaaggaaatatcttcgtataaaaactagacagaatcattctcagaaactgctctgcgatgtgtgcgttcaactctcagagtttaacttttcttttcattcagcagtttggaaacactctgtttgtaaagtctgcacgtggatattttgaccacttagaggccttcgttggaaacgggtttttttcctgtaaagctagacagaagaattcccagtaacttccttgtgttgtctacattcaactcacagagttgaacgttcccttagacagagcagatttgaaacactctttttgtgcaattggcaagtggtgatttcagccgctttggggtcaatggtagaaaaggaaatatcttcgtataaaaactagacagaatgattctcagaaacttcattgtgaagtgtgcgttcaactcacagagtttaacctttcttttcatagagcagttaggaaacactctgtttgtaaagtctgcaagtggatattcagacctctttgaggccttcgttggaaacgggatttcttcatactgtgctatacagaagaattctcagtaacttcattgtgttgtgtgtattcaactcacagagttgaacgatcctttacacagagcatacttgaaacactcttgttgtggaatttgcaagtggagatttcagccgctttgaggtcaatggtagaataggaaacatcttcctatagaaactagacagaatgattctcagaaactccttagtgatgtgtgtgtccaactcacagggtttaacctttcttttcatagagcagttagcaaacactctgtttgtaaagtctgcaagaggatattcagacctttttgaggccttcgttggaaacgggtttttttcatataaggctagacagaagaattcccagtaacttccttgtgatgtgtgtgttcaactcacagagttgaactttcatttacatagagcagatttgaaacactctttttgtggaatttgcaagtggagatttcaagcgctttgaggccaaaggcagaaaaggaaatatcttcgtataaaaactacacagaatcattctcagaaactgctgcgtgatgtgtgcgttcaactctcagagtttaacttttcttttcattcagcagtttggaaacactctgtttgtaaagtctgcacgtggaaattttgaccacttagaggccttcgttggaaacgggtttttttcatgtaaggctagacagaagaattcccagtaacttccttgtgttgtgtacattcaactcacagagttgaacgttcccttagacagagcagatttgaaacactctttttgtacaattggcaagtggagatttcaagcgctttaaggtcaaaggcagaaaagaaaatatcttcgtttcaaaactagacagaatcattcccacaaactgcgttgtgacgtgttcgttcaactcacagagtttaacctttctgttcatagagcagttaggaaaaactctgtttgtaaagtctgtaagtggatattctgacatcttgtggccttcgttggaaacgggatttcttcatattctgctagacagaagaattctcagtaacttccttgtgttgtgtctattcaactcacagagttgaacgatcctttacacagagcagacttgaaacactctttttgtggaatttgcaagtggagatttcagccgctttgaggtcaatggtagaaaaggaaatatcttcgtataaagactagacagaatgattctcagaaactcctttgtgatgtgtgcgttcaactcacagagtttaacgtttctgttcatagagctgttaggaaacactctgtttgtaaagtctgcaagtggatattcagacctccttgaggccttcgttggaaacgggatttcttcatattctgctagacagagtaattctcagtaacttccttgtgttgtgtgtattcaactcacagagttgaacgatcctttacacagagcagatttgtaacactctttttgtggaatttgcaagtggagatttcaagcgctttgaggccaaaggcagaaaaggaaatatcttcgtttcaaaactagacagaatcattctcagaaactgctctgcgatgggtgcgttcaactctcagagtttaacttttcttttcattcagcagtttggaaacactctgtttgtaaagtctgcacgtggataacttgaccacttagaggacttcgttggaaacgggtttttttcctgtaaggctagacagaagaattcccagtaacttccttgtgttgtgtacattcaactcacagagttgaacgttcccttagacagagcagatttgaaacactctttttgtgcaattggcaaatggagatttcaatcgctttaaggtcaatggcagaaaaggaaatatcttcgtttcaaaactagacagaatcattcccacaaactgcgttgtgatgtgttcgttcaactcacagagtttaacctttcttttcttagagcagttaggaaacagtctgtttgtcaattctgtaagtggatattctgacatcttgtggccttcgttggaaacgggatttcttcatattctgctagacagaataattctcagtaacttcccttgtgttgtgtgtattcaactcacagagttgaacgatcctttacacagagcagacttgaaacactctttttgtggaatttgtaagtggagatttcagccgctttgaggtcaatggtagaataggaaatatcttcctatagaaactagacagaatgattctcagaaactcctttgtgatgtgtgcgttcaactcacagagtttaacctttcttttcatagagcagttaggaaacactctgtttgtaaagtctgtaagtggatattcagacctccttgaggccttcgttggaaacgggatttcttcctattatgctagacagaagaattctcagtaacttccttgtgttgtgtgtattcaactcacagagttgaacgatcctttacacagagcagacttgaaacacactttttgtggaatttgcaagtggagatttcagccgctttgggttcaatggtagaataggaaatatcttcctatagaaactagacagaatcattctcagaaactgctctgcgatgtgtgcgttcaactctcagagtttaacttttcttttcattcagcagtttggaaacactctgtttgtaaagtctgcacgtggatactttgaccacttagaggccttcgttggaaacgggtttttttcctgtaaggctagacagaagaattcccagtaacttccttgtgttgtgtgcattcaactcacagagttgaacgttcccttagacagagcagatttgaaacatcctatttgtgcaatttgcaagtgtagatttcaagcgctttaaggtcaacggcagaaaaggaaatatcttcctttcaaaactagacagaatcattcccacaaactgcgttgtgatgtgttcgttcaactcacagagtttaacctttcttttcatagagcagttaggaaacagtctgtttgtaaattttgtaagtggatattctgacatcttgtggccttcgttggaaacgggatttcttcatattctgctagacagaagaattctcagtaacttccttgtgttgcgtgtattcaactcacagagttgaacgatcctttacccagagcggacttgaaacactctttttgtggaatttgcaagtggagatttcagccgctttgaggtcaatggtagaaaaggaaatatcttcttatacagactagacagaatgattctcagaaactcctttgtgatgtgtgcgttcaactcacagagttcaacctttcttttcatagagcagttgggaaacactctgtttgtaaagtctgcaagtggatattcagacctccttgaggccttcgttggaaacgggatttcttcatattctgctagacagaagaattcccagtaacttccttgtgttgtgtgtgttcaactcacagagttaaactttcatttacccagagcagatttgaaacactctttttgtggaatttgaaagtggagatttcaagcgctttgaggccaaaggcagaaaaggaaatatcttcgtttcaaaactagacagaatcattctcagaaagtgctctgcgatgtgtgcgttcaactctcagagtttaactttgcttttcattcagcagtttggaaacactctgtttgtaaagtctgcacgtggataatttgaccacttagaggccttcgttggaaacgggtttttttcatgtaaggctagacagaagagttctcagtaacttccttgtgttgtgtgtattcaactcacacagttgaacgatcctttacagagagcagacttgtaacactctttttgtggaatttgcaagtggagatttcagccgctttgaagttaaagtagaaaaggaaatatcttcctataaaaactagacagaatgattctcagaaactcctttgtgatgtgtgcgttcaactcacagagtttaacctttcttttcatggagcagttaggaaacacactgtttgtaaagtctgcaagtggatattcagacctccttgaggccttctttggaaacgggatttcttcatattctgctagacagaataattctcagtaacttccttgtgttgtgtgtattcaactcacagagttgaacgatcctttacacagagcagacttgaaacactctttttgtggaatttgcaagtggagatttcagccgctttgaggtcaatggtagaaaaggaaatatcttcgtataaagactagacagaatgattctcagaaactcctttttgatgtgtgcgttcaactcacagagtttaacctttcttttaatagagcaattaggaaacactctgtttctaaagtctgcaagtggatattcagacctcttagcggccttcgttggaaacgggatttcttcatattttgctagacagaagaattctcagtaacttccttgtgttgtgtgcattcaactcacagagttgaacgatcctttacacagagcagattggaaacactctttttgtggaactgcaagaggagatttcagccgctttgaggtcaatggtagaaaaggaaatatcttcgtataaaaactagacagaatcattctcagaaactgctctgcgatgtgtgcgttcaactctcagagtttaacttttcttttcattcagcagtttggaaacactctgtttgtaaagtctgcacgtggatattttgaccacttagaggccttcgttggaaacgggtttttttcctgtaaggctagagagaagaattcccaggaacttccttgtgttgtgtacattcaactcacagagttgaacgttcccttagacagagcagatttgaaacactctttttgtgcaattggcaagtggtgatttcagcagctttgaggtcaatggtagaaaaggaaatatcttcgtataaaaactagacagaatgattctcagaaactcctttgtgatgtgtgcgttcaactcacagagttcaacctttcctttcatagagcagttgggaaacactctgtttgtaaagtctgcaagtggatattcagactttgaggccttcgttggaagcgggatttcttcatattctgctagacagaagaattctcagtaactgccttgtgttgtgtgtattcaactcacagagttgcacgatcctttacacagagcagacttgaaacactctttttgtggaatttgcaagtggagatttcagccgctttgaggtcaatggtagaataggaaatatcttcctatagaaactagacagaatgattctcagaaacttctttgtgatgtgtgcgttcaactcacagagtttaacctttcttttcatagagcagttaggaaacactctgtttgtaaagtctgcaagtggatattcagacctccttgaggccttcgttggaagcgggatttcttcatgttctgctagacagaagaattctcagaaactttcttgtgttgtgtgttttcaactcacagagttgaacgatcctttacacagagcagacttgaaacactccttttgtggaatttgcaagtggagatttcagccgctttgaggtcaatggtagaataggaaatatcttcctatagaaagtagacagaatcattctcagaaactgctgcgtgatgtgtgcgttcaactctcagagtttaacttttcttttcattcagcggtttggaaacactctgtttgtaaagtctgcacgtggatattttgaccacttagacgccttcgttggaaacgggtttttttcatgtaaggctagacagaagaattcccagtaactttccttgtgttgtgtgcattcaactcacagagttgaacgttcccttagacagagcagatttgaaacactctatttgtgcaatttgcaattgtagatttcaagcgttttaaggtcaatggcagaaaaggaaatatcttcgtttcaaaactagacagaatcattctcagaaactgctctgcgatgtgtgcgttcaactctcagagtttaacttttcttttcattcagcagtttggaaacactctgtttgtaaagtctgcacgtggataatttgaccacttagaggtcttcgttggaaacgggtttttttcatgtaaggatagacagaagaattctcagtaacttccttgtgttgtgtgtattcaactcacagagttgaacgatcctttacacagagcagacttgtaacactctttttgtggaatttgcaagtggagatttcagccgctttgaagtcaaaggtagaaaaggaaatatcttcctataaacactagacagaatgattctcagaaactcctttgtgctgtgtgcgttcaactcacagagtttaacctttcttttcatagaacagttagtaaacactctgtttgtaaagtctgcaagtggatattcagacacctttgaggctttcgttggaaacgggatttcttcatattctgctagacagaagaattctcagtaacttccttgtgttgtgtgtattcaactgacagagttgaactttcatttagagagagcagatttgaaacactgtttttgtggaatttgccagtggagatttcaagcgcattggggccaaaggcagaaaaggaaatatcttcgtataaaaactagacagaatcattctcagaaactgctgcgtgatgtgtgcgttcaactctcagagtttaacttttcttttcattcagcggtttggaaacactctgtttgtaaagtctgcacgtggatattttgaccacttagaggccttcgttggaaacgggttttttttcatgtaaggctagacagaagaattcccagtaacttccttgtgttgtgtgcattcaactcacagagttgaacgttcccttagacagagcagatttgaaacactctatttgtgcaatttgcaagtgtagatttcaagtgctttaaggtcaacggcagaaaaggaaatatcttcgtttcaaaactagacagaatcattcccacaaactgcgttgtgatgtgttcgttcaactcacagagtttaacctttcttttcatagagcagttaggaaacagtctgtttgtaaattctgtaagtggatattctgacatcctgtggccttcgttggaaacgggatttcttcatattctgctagacagaagaattctcagtaacttccttgtgttgtgtttattcaactcacagagttgaatggtcctttacacagagcagacttgaaacactctttttgtggaatttgcaagtggagatttcagccgctttgaggtcaatggtagaaaagtaaatatcttcctataaagactagacagaatgattctcagaaactcctttatgatgtgtgcattcaactcacagagtttaacctttcttttcatagagcagttaggaaacactctgcttgtaaagtctgcaagtggatattcagccctctttgaggccttcgttggaaacgggtttttttcatataaggctagacagaagaattcccagtaacttccttgtgttgtgtgtgttcaactcacagagttgaactttcatttacacagagcagatttgaaacactctttttgtggaatttgcaagtggagatttcaagcgctttgaggccaaaggcagaaaaggaaatatcttcgcataaaaactagacagaatcattctcagaaactgctctgcgatgtgtgcgttaaactctcagagtttaacttttctttcattcagcagtttggaaacactctgtttgtaaagtctgcacgtggatattttgaccacttagaggccttcgttggaaacggttttttttcctgtaaggctagacagaagaattcccagtaacttccttgtattgtgtacattcaactcacagagttgaacgttcccttagacagagcagatttgaaacactctttttgtgcaattggcaaatggagatttcaagcgctttaaggtcaatggcagaaaaggaaatatcttcgtttcaaaactagacagaatcattcccacaaactgcgttgtgatgtgttcgttcaactcacagagtttaacctttctgttcatagagcagttaggaaacactctgtttgtaaagtctgcaagtggatattcagacctcctagaggccttcgttggaaacgggatttctccatattctgctagacagaagaattctcagtaacttccttgtgttgtgtgtattcaactcacagagttgaacgatccctttacacagagcagacttgtaacactctttttgtggaatttgcaagtggagatttcagccgctttgaagtcaaaggtagaaaaggaaatatcttcctataaaaactagacagaatgattctcagaaaatcctttgtgatgtgtgcgttcaactcacagagtttaacttttcttttcatagagcagttaggaaacactctgtttgtaaagtctgcaagtggatattcagacctctttgaggccttcgttggaaacgggatttcttcatattctgctagacagaagaattctcagtaacttccttgtgttgtgtgtattcaactgacagagttgaactttcatttagagagagcagattgaaacactgtttttgtggaatttgcaagtggagatttcaagcgctttgtggccaaaggcagaaaacgaaatatcttcgtataaaaactagacagaatcattctcagaaactgctgcgtgatgtgtgcgttcaactctcagagtttaacttttcttttcattcagcggtttggaaacactctgtttgtaaagtctgcacgtggatattttgaccacttagaggccttcgttggaaacgggtttttttcatgtaaggttagacagaagaattctcagtaacttccttgtgtggtgtgtattcaactcacagaggtgtacgatcctttacacaaagcagacttgaaacactctttttgtggaatttgcaagtggagatttcagccgctttgaggtcaatggtagaaaaggaaatatcttcgcataaagaatagacagaatgattctcagaaactcctttgtgatgtgtgcgttcaactcacagagtttaacctttctgttcatagagcagttaggaaacactctgtttgtaaagtctgcaagtggatattcagacctccttgaggccttcggtggaaacgggatttcttcatattatgctagacaaaagaattctcagtaacttccttgtgttgtgtgtattcaactcacagagttgaacgatcctttacacagagcagacttgaaacactgtttttgtggaatttgcaagtggagatttcagccgctttgaggtcaatggtagaataggaaatatcttcctatagaaactagacagaatgattctcagaaactcctttgtgatgtgtgcgttcaactcacagagtttaacctttcttttcatagagcagttaggaaacactctgtttgtacagtctgcaagtggatattcagacatccttgaggcttttgttggaaacgggatttcttcatattctgctagaaagaagaattctcagtaacttccttgtgttgtgtgtattcaactgacagaattgaactttcatttagagagagcagatttgaaacactgtttttgtggaaattgcaagtggagatttcaagcgctttggggccaaaggcagaaaaggaaatatcttcgtataaaaagtagacagaatcattctcagaaactgctgcgtgatgtgtgcgttcaactctcagagtttaacttttcttttcattcagcggtttggaaacactctgtttgtaaagtctgcacgtggatattttgaccacttagaggccttcgttggaaacgggtttttttcatgtaaggctagacagaagaattcccagtaacttccttgtgttgtgtgcattcaactcacagagttgaacgttaccttagacagagcagatttgaaacactctatttgtgcaatttgcaagtgtagatttcaagcgctttaaggtcaatggcagaaaaggaaatatcttcgtttcaaaactagacagaatcattcccacaaactgcgttgtgatgtgttcgttcaactcacagagtttaacctttcttttcatagagcagttaggaaacagtctgtttgtcaattctgtaagtggatattctgacatcttgtggccttcgttggaaacgggatttcttcatattctgctagaaagaagaattctcagtaacttccttgtgttgtgtgtattcaactcacagagttgaacgatcttttacacagagcagacttgaaacactctttttgtggaatttgcaagtggagatttcagcccttttgaggtcaatggtagaaaaggaaatatcttcgtataaagactagacagaatgattctcagaaactcctttgtgatgtgtgcgttcaactcacagagtttaacctttcttttcatagagcagttgggaaacactctgtttgtaaagtctgcaagtggatattcagacatccttgaggctttcgttggaaacaggatttcttcatattctgctagaaagaagaattcccagtaccttccttgtgttgtgtgtgttcaactcacagagttgaactttcatttacacagagcagatttgaaacactctttttgtggaatttgcaagtggagatttcaagcgctttgaggccaaaggcagaaaaggaaatatcttcgtttcaaaactagacagaatcattctcagaaactgcagcgtgatgtgtgtgttcaactctcagagtttaacttttcttttcattcagcggtttggaaacactctgtttgtaaagtctgcacgtggaaattttgaccacttagaggccttcgttggaaacgggtttttttcatgtaaggctagacagaagaattcccagtaacttccttgtgttgtgtgcattcaactcacagagttgaacgttcccttagacagagcagatttgaaacactctatttgtgcaatttgcaagtgtagatttcaagcgctttaaggtcaatggcagaaaaggaaataccttcgtttcaaaactagacagaatcattcccacaaactgcgttgtgatgtgttcgttcatctcacagagtttaacctttcttttcatagagcagttaggaaacattctgtttgtaaattctgtaagtggatattctgacatcttgtggccttcgttggaaacgggatttcttcatattctgctagacagaagaattctcagaatcttccttgtgttgtgtgtattcaactcacacagttgaacgatggtttacacagagcagatttgaaacactctttttgtggaatttgcaagtggagatttcagccgctttgaggtcaatggtagaaaaggaaatatcttcgtataaaaactagagagaatgattctgagaaactcctttgtgatgtgtgcgttcaactcacacactttaacctttcttttcatagagcaattaggaaacactctgtttgtaaagtctgcaagtggatattcagacctccttgaggccttctttggaaacgggatttcttcatattctgctagacagaaaaattctcagaatcttccttgtgttgtgtgtattcaactcacagagttgaacgatcctttacacagagcagatttgaaacactctttttgtggaatttgcaagtggagatttcaagcgctttgaggctaaaggcagaaaaggaaaatatcttcgtataacaactagacagaatcattctcagaaactgctgcgtgatgtgtgcgttcaactctcagagtttaacttttcttttcattcagcggtttggaaacactctgtttgtaaagtctgcacatggatattttgcccacttagaggccttcgttggaaacgggtttttttcatgtaaggctagacagaagaattcccagtaacttccttgtgttgtgtgcattcaactcacagagttgaacgttcccttagacagagcagatttgaaacactctatttgtgcaatttgcaagtgtagttttcaagctctttaaggtcaacggcagaaaaggaaatatcttggtttcaaaactagacagaatcattcccacaaactgcgttgtgatgtattcgttcaactcacagagtttaacctttctgttcatagagcagttaggaaacactctgtttgtaaagtctgtaagtggatattctgacatcttgtggcccttcgttggaaacgggatttcttcatattctgctagacagaagaattctcagtaacttccttgtgttgtgtgtattcaactcacagagttgaacgatcctttacacagagcagacttgaaacactctttttgtggaatttgcaagtggagatttcagccgctttgaggtcaatggtagaataggaaatatcttcctatagaaactagacaaacgattctcagaaactcctttgtgatgtgtgcgttcaactcacagagtttaacctttctgttcatagagcagttaggaaacactctatttgtaaagtctgcaagtggatattcagacctctttgaggccttcgttggaaacgggatttcttcatattctgctagacagaagaattcccagtaacttccttgtgttgtgtgtgttcaactcacagagttgaactttcatttacaaagagcatatttgaaacactctttttgtggaatttgcaagtggagatttcaagcgctttgaggccaaaggcagaaaaggaaatatcttcgtataaaaactagacagaatcattctcagaaactgctctgcgatgtgtgcgttcaactctcagagtttaacttttcttttcattcagcagtttggaaacactctgtttgtaaagtctgcacgtggatattttgaccacttacaggccttcgttggaaacgggtttttttcctgtaaggctagacagaagaattcccagtaacttccttgtgttgtgtgctttcaactcacagagttgaacgttcccttagacagagcagatttgaaacactctatttgtgcaatttgcaagtgtagatttcaagcgctttaaggtcaatggcagaaaaggaaatatcttcgtttcaaaactagacagaatcattcccacaaacagcgttgtgatgtgttcgttcaactcacagagtttaacctttcttttcatagagcagttaggaaagagtctgtttgtcaattctgtaagtggatattctgacatcttgtggcattcgttggaaacgggatttcttcatattctgctagacagaagaattctcagtaacttccttgtgttgtgtgtattcaactcacagagttgaacgatcctttacacagagcagacttgaaacattctttttgtggaatttgcaagtggagatttcagccgctttgtggtcaatggtagaataggaaatatcttcctatagaaactagacagaatgattctcagaaacttctttgtgatgtgtgcgttcaactcacagagtttaacctttcttttcatagagcagttaggaaacactctgtttgtaaactctgcaagtggacattcagacctctttgaggccttcgttggaaacgggatttcttcatactgtgctagacagaagaattctcagaatcttccttgtgttgtgtgtattcaactcacacagttgaacgatcctttacacagagcagacttggaacactctttttgtggaatttgcaagtggagatttcagccgctttgaagtcaaatgtagaaaaggaaatatcttcctataaaaactagacagaatcattctcagaaaatcctctgtgatgtgtgcgttcaactctcagagtttaacttttcttttcattcagcagttcagaaacactctgtttgtaaagtctgcacgtggatattttgaccacttagaggccttcgttggaaacgggtttttttcatataagggtagacaggagaattcccagtaacttccttgtgttgtgtgcattcaactcacagagttgaacgttcccttagacagagcagatttgaaacactctatttgtgcaatttgcaagtgtagatttcaagcgctttaaggtcaacggcagaaaaggaaatatcttcgtttcaaaactagacagaatcattcccacaaactgcgttgtgatgtgttcgttcaactcacagagtttaacctttctgttcatagagcagttaggaaacactctgtttgtaaagtctgtaagtggatattcagacatcttgtggccttcgttggaaacgggatttcttcatattctgctagacagaagaattgtcagaaacttccttgtgttgtgtgtcttcaactcacagagttaaacgatgctttacacagagtagacttgaaacactctttttctggaatttgcaagtggagatttcagccgctttgaggtcaatggtagaaaaggaaatatcttcgtataaaaactagacagaatgattctcagaaactcctttgtgatgtgtgcgttcaactcacagagtttaacttttcttctcatagagcagttaggaaacactctgtttgtaaagtctgcaagtggatattcagacctctttgaggtcttcgttggaaacgggatttcttcatattatgctagacagaagaattctcagtaacttccttgtgttgtgtgtattcaactgacagagttgaactttcatttagacagagcagatttgaaacactctttttccggaatttgcaagtggagatttcaagcgctttgaggccaaaggcagaaaaggaaatatcttcgtataaaaactagacagaatcattctcagaaactgctctgtgatgtgtgcgttcaactctcagagtttaacttttcttttcattcagcagtttggaaacactctgtttgtaaagtctgcacgtggatattttgaccacttagaggccttcgttggaaacgggtttttttcatgtaaggctagacagaagaattcccagtaatttccttgtattgtgtgcattcaactcacagagttgaacgttcccttagacagagcagatttgaaacactctatttgtgcaatttgcaagtgtagatttcaagcgctttaaggtcaatggcagaaaaggaaatatcttcgtttcaaaactagacagaatcattcccacaaactgcgttgtgatgtgtgcgttcaactcacagagtttaacctttcttttcatagagcagttaggaaacagtctgtttgtcaattctgtaagtggatattctgacatcttgtggccttcgttggaaacgggatttcttcatattctcctagacagaagaattctcagtaacttccttgtgttgtgtgtattcaactcacagagttgaacgatcctttacacagagcagacttgaaacactctttttctggaatttgcaagtggagatttcagccgctttgaggtcaatggtagaataggaaatatctttctatagaaactagacagaatgattctgagaaactcctttgtgatgtgtgcgtacaactcacagagtttaacctttcttttcatagagcagttgggaaacactccgtttgtaaactctgcaagtggatattcagacctccttgaggccttcgttggaaacgggatttcttcatattatgctagacagaagaattctcagtaacttccttgtgttgtgtgtattcaactgacagcagttgaactttcatttagagagagcagatttgaaacactgtttttgtggaatttgcaattggagatttcaagcgctttggggccaaaggcagaaaaggaaatatcttcgtataaaaactacacagaatcattctccgaaactgctctgcgatgtgtgcgttcaactctcagagtttaacttctcttttcattcagcagtttggaaacactctgtttgtaaagtctgcacgtggataacttgaccacttagaggccttcgttggaaacgggtttttttcatgtaaggctagacagaagaattctcagtaacttccttctgttgtgtgtattcatctcacagagttgaacgatcctttacacagagcagacttgtaacactctttttgtgcaattggcaaatggagatgtcaagcgctttaaggtcaattgcagaaaagaaaatatcttcgtttcaaaactagacagaatgattctcagaaacttctttgtgatgtgtgcgttcaactcacagagtttaaccttatttttcatagagcagttaggaaacactctgtttgtaaactctgcaagtggatattcagacctctttggggccttcgttggaaacgggatttcttcatactatgctagacagaagaattctcagtaacttccttgtgttgtgtgtattcaactcacagagttgaacgatcctttacacagagcagacttgaaacactctttttgtggaatttgcaagtggagatttcaagcgctttgaggccaaaggcagaaaaggaaatatcttcgtataaaaactagacagaatgattctcagaaacttctttgtgatgtgtgtgttcaactcacagagtttaacctttcttttcatagagcagttaggaaacactgtgtttttaaactctgcaagtggatattcagacctctttgaggcctttccttggaaacgggtttcttcatactgtgctagacagaagaattctcagtaacttccttgtgttgtgtgtattcaactgacagagttgaactttcatttagagagagcagatttgaaacactgtttttgtggaatttgcaagtggagatttcaagcgctttggggccaaaggcagaaaaggaaatatcttcgtataaaaattagacagaatcattctcagaaactgctgcgtgatgtgtgcgttcaactctcagagtttaacttttcttttcattcagcggtttggaaacactctgtttgtaaagtctgcacgtggatattttgcccacttagaggccttcgttggaaacgggtttttttcatgtaaggctagacagaagaattcccagtaacttccttgtgttgtgtacattcaactcacagagttgaacgttcccttagacagagcagatttgaaacactctttttgtgcaattggcaaatggagatttcaagcgctttaaggtcaatggcagaaaagggaatatcttcgtttcaaaactagacagaatcattcccacaaactgcgttgtgatgtgttcgttcaactcacagagtttaacctttctgttcatagagcagttaggaaacactctgtttgtaaagtctgtaagtggatatcctgacatcttgtggccttcgttggaaaagggatttcttcatattctgctagacagaagaattctcagaaacttcctggtgttgcgtgttttcaactcacagagttctacgatcctttacacagagtagacttgaaaaactctttttgttgaattggccagtggagatttcagccgctttgaggtcaatggtagaaaaggaaatatcttcgtataaaaactagacagaatgattctcagaaactcctttgtgatgtgtgcgttcaactcacagagtttaacctttcttttcatagagcagttaggaaacactctgtttgtaaagtctgcaagtggatattcagacatctttgaggctttcgttggaaacgggatttcatcatattctgctagacagaagaattcccagtaacttccttgtgttgtgtgtgttcaactcacagagttgaactttcatttacacagagcagatttgaaacactctttttgtggaatttgcaagtggagatttcaagcgctttgaggccaaagcagaaaaggaaatatcttcgtttcaaaactagacagaatcattctcagaaactgctgcgtgatgtgtgcgttcaactctcagagtttaacttttcttttcattcagcggtttggaaacactctgtttgtaaagactgcacgtggatattttgaccccttagaggtcttcgttggaaacgggtttttttcatgtaaggctagacagaagaattcccagtaacttccttgtgttgtgtgcattcaactcacagagttgaacgttcccttagacagagcagatttgaaacactctatttgtgcaatttgcaagtgtagttttcaagctctttaaggtcaacggcagaaaaggaaatatcttcgtttcaaaactagacagaatcattcccacaaactgcgttgtgatgtgttcgttcaactcacagagtttaacctttgttttcatagaggagttaggaaacagtctgtttgtaaattctgtaagtggatattctgacatcttgtggccttcgttggaaacgggatttcttcatattctgctagacagaagaattctcagttacttccttgtgttgtgtgtattcaactcaaagagttcaacgatcctttctacagggcagacttgaaacactctttttgtggaatttgcaagtggagatctcagccgctttgtggtcaatagtagaaaaggaaatatcttcgtataaaaactagacagaatgattctcagaaactcccttgtgatgtgtgcgttcaactcacagagtttaacctttcttttcatagagcagttaggaaacactctgtttgtaaagtctgcaagtggatattcagacttctttgaggccttcgttggaaacgggatttcttcatattctgctagacagaagaattctcagtaacttccttgtgttgtgtgtattcaactgacagagttgaactttcatttagagacagcagatttgaaacactgtttttgtggaagttgcaagtggagatttcaagcgctttggggccaaaggcagaaaaggaaatatcttcgtataaaaactagacagaatcattctcagaaaatgctctgtgatgtgtgcgttcaactctcagagtttaacttttcttttcattcagcagtttggaaacactctgtttgtaaagtctgcacgtggatattttgaccacttagaggccttcgttggaaacgggtttttttcatgtaagggtagaaagaagaattcccagtaacttccttgtgttgtgtgcattcaactcacagagttgaacgttcctttagacagagcagatttgaaacactctatttgtgcaatttgcaagtgtagttttcaagctctttaaggtcaacggcagaaaaggaaatatcttggtttcaaaactagacagaatcattcccacaaactgcgttgtgatgtgttcgttcaactcacagagtttaacctttcttttcatagaccagttaggaaacagtctgtgtgtaaattctgtaagtggatattctgacatcttgtggccttcgttggaaacgggatttcttcatattctgctagacagaagaattctcagaatcttccttgtgttctgtgtattcaactcacagagttgaacgatcctttacacagagcagacttgaaacactctttttgtggaatttgcaagtggagatttcagccgctttgaggtccatggtagaaaaggaaatatcttcgtataaaaactagacagaatgattctcagaaacttcattgtgatgtgtgcgttcaactcacagagtttaacctttcttttcatagagcagttaggaagcactctgtttgtcaactctgcaagtggatattcagacctctttgaggccttcgttggaaacgggatttcttcatactgtgctagacagaagaaatctcactaacttccttgtgttgtgtgtattcaactcacagagttgaacgatcctttacacagagcggacttgaaacactcattttgtggaatttgcaagtggagatttcagccgcgttgaggtcaatggtagaaaaggaaatatcttcgtataaaaactagacagaatcattctcagaaactgctgcgtgatgtgtgcgttcaactctcagagtttaacttttcttttcattcagcggtttggaaacactctgtttgtaaagtctgcacgtggatattttgaccacttagaggccttcgttggaaacgggtttttttcatgtaaggctagacagaagaattcccagtaacttccttgtgttgcgtgcattcaactcacagagttgaacgttcccttagacagagcagatttgaaacactctatttgtgcaatttgcaagtgtagatttcaagcgctttaaggtcaacggcagaaaaggaaatatcttcgtttcaaaactagacagaatcattcccacaaactgcgttgtgatgtgttcgttcaactcacagagtttaacctttcttttcatagtgcagttaggaaacagtctgtttgtaaattctgtaagtggatattctgacatcttgtggccttcgttggaaacgggatttcttcatattctgctagacagaagagttctcagtaacttccttgtgttgtgtgtattcaactcacagagttgaacgatcctttacacagagcagacttgtaacactctttttgtggaatttgcaagtggagatttcagccgctttgaagtcaaaggtagaaaaggaaatatcttcctataaaaactagacagaatgattctcagaaactcctttgtgatgtgtgcgttcaactcacagagtttaacctttcttttcatagagcagttaggaaacactctgtttgtaaagtctgcaagtggatattcagacctctttgaggcctccgttggaaacgggtttttttcatataaggctagacagaagaattccccagtaacttcccttgtgttgtgtgtgttcaactcacagagttgaactttcatttacacagagcagatttgaaacactctttttgtggaatttgcaggtggagatttcaagcgctttgaggccaaaggcagaaaaggaaatatcttcgtataaaaactagacagaatcattctcagaaactgctctgcgatgtgtgcgttcaactctcagagtttaacttttcttttcattcaacagtttgaaaacactctctttgtaaagtctgcacgtggatattttgaccacttagaggccttcgttggaaacgggtttttttcttgtaaggctagacagaagaattcccagtaacttccttgtgttgtgtgcattcaactcacagagttgaaccttcccttagacagagcagatttgaaacactctatttgtgcaatttgcaagtgtagatttcaagcgctttaaggtcaatggcagaaaaggaaatatcttagtttcaaaactagacagaatgattctcagaaactcttttgtgatgtgtgcgttcaactcacagagtttaacctttctgttcatagagctggtaggaaacactctgtttgtaaagtttgcaagtggatattcagacctccttgaggccttcgttggaaacgggatttcttcatattctgctagacagaagaattctcagtaacttccttgtgttgtgtgttttcaactcacagagttgaacgatcctttacacagagcagacttgaaacactctttttgtggaatttgcaagtggagatttcagccgctttgaggtcaatggtagaataggaaatatcttcctgtagaaactagacagaatgattctcagaaactcctttgagatgtgtgcgttcaactcacagagtttaacctttcttttcatagagcagttaggaaacactctgtttgtaaagtctccaagtggatattcagacctctttgaggccttcgttggaaacgggtttttttcatataaggctagacagaagaattctcagtaacttccttctgttgtatgtattcaactgacagagttgaactttcatttagagagagcagatttgaaacactgtttttgtggaatttgcaagtggagatttcaagcgcttcggggccaaaggcagaaaaggaaatatcttcgtataaaaactagacagaatcattctcagaaactgctgcgtgatgtgtgggattacctctcagagttttacttttcttttcattcagcggtttggaaacactctgtttgtaaagtctgcacgtggatattttgaccacttagaggccttcgttggaaacgggtttttttcatgtaaggctaaacagaagaattcccagtaacttccttgtgttgtgtacattcacctcacagagttgaacgttcccttagacagagcagatttgaaacactctttttgtgcaattggcaaatggagatttcaagcgctttaaggtcaatggcagaaaaggaaatatcttcgtttcaaaactagacagaatcattcccacaaactgcgttgtgatgtgttcgttcaactcacagagtttaacctttcttttcatagagcagttaggaaacagtctgtttgtcaattctgtaagtggatattctgacatcttgtggccttcgttggaaacgggatttcctcatattctgctagacagaagaattcccagtaacttccttgtgttgtgtacattcaactcacagagttgaacgttcccttagacagagcagacttgtaacactctttttgtggaatttgcaagtggagatttcagccgctttgaagtcaaatgtagaaaaggaaatatcttcctataaaaactagacagaatgattctcagaaactcctttgtgatgtgtgtgttcaactcacagagtttaacgtttcttttcatagagcagttagtaaacactcagtttataaagtctgcaagtggatattcagacccctttgaggccttcgttggaaacgggatttcttcatattatgctacacagaagaattcccagtaacttccttgtgatgtgtgtgttcaactcacagagttgaactttcatttacacagagcagattggaaacactctttttgtggaatttgcaagtggagatttcaagcgctttgaggccaaaggcagaaaaggatatatcttcgtataaaaactacacagaatcattctcagaaactgctctgcgatgtgtgcgtacaactctcagagcttaacttttcttttcattcagcagtttggaaacactctgtttgtaaagtctgcacgtggataatttgaccacttagagaccttcgttggaaacgggtttttttcatgtaaggctagacagaagaattcccagtaacttccttgtgttgtgtacattcaactcacagagttgaaggttcccttagacagagcagatttgaaacactctttttgtgcaattggcaagtggagatttcaagcgctttaaggtcaatggcagaaaaggaaatatcttcgtttcaaaactagacagaataattctcagaaactcctttgtgatgtgtgcgttcaactcacagagtttaacctttcttttcatagagcagttcggaaacactctgtttgtaaagtctgcaagtggatattcagacctccctgaggccttctttggaaacgggatttcttcatattatgctagacagaagaattctcagtaacttccttgtgttgtgtgtattcaactcacagagttgaacaatcctttacacagagcagacttgaaacactctttttgtggaatttgcaagtggagatttcagccgctttgaggtcaatgttagaataggaaatatcttcctatagaaactagacagaacgattctcagaaactcctttgtgatgtgtgcgttcaactcacagagtttaacctttcttttcatagagcagttaggaaacactctgtttgtaacgtctgcaagtggatattcagacctccttgaggccttcgttggaaacgggatttcttcatattctgctagacagaagaattcccagtaacttccttgtgttgtgtgtgttcaactcacagagttgaactttcatttacacagagcagatttgaaacactctttttgtggaatttgcaaatggagatttcaagcgctttgaggccaaaggcaggaaaggaaatatcttcgtataaaaactagacagaatcattctcagaaactgctctgcgatgtgtgcgttcaactctcagagtttaactttgcttttcattcagcagtttggaaacactctgtttgtaaagtctgcacctggataatttgaccacttagaggccttcgttggaaacgggtttttttcatgtaaggctagacagaagaattcccagtaacttccttgttttgcgtgtgttcaactcacagagttgaactttcatttacacagagcagatttgaaacactctttttgtggaatttgcaagtggagatttcaagcgctttgagggcaaaggcagaaaaggaaatatcttcgtttcaaaactagacagaatcattcccacaaactgcgttgtgatgtgttcgttcaactcacagagtttaacctttcttttcatagagcagttaggaaacactctgttggtaaattctgtaagtggatattctgacatcttgtggccttcgttggaaacgggatttcttcatcttctgctagacagaacaattctcagtaacttccttgtgttgtgtgtattcaactcacagagttgaatgatcctttacacagaacagtcttgaaacactctttttgtggaatttgcaagtggagatttcagccgctttgaggtccatggtagaataggaaatatcttcctatagaaactagacagaatgattctcagaaactcctttgtgatgtgtgcgttcaactcagagagtttaacttttcttttcatagagcagttaggaaacactctgtttgtaaagtctgcaagtggatattccgacctctttgaggccttcgttggaaacgggatttcttcatattatgctagacagaagaattcccagtaacttccttgtgttgtgtgtgttcaactcacagagttgaactctcatttacacagagcagatttgaaacactctttttgtggaatttgcaagtggagatttcaagcgctttgaggtcaaaggcagaaaaggaaatatcttcgtataaaaactagacagaatcattctcagcaactgctgcgtgatgtgtgcgttcaactctcagagtttaccttttcttttcattcagcggtttggaaacactatgtttgtaaagtctgcacgtggatattttgaccacttagaggccttcgttggaaacgggattttttcatgtaaggctagacagaagaattcccagtaacttccttgcgttgtgtacattcaactcacagagttgaacgttcccttagacagagcagatttgaaacactctttttgtgcaattggcaagtggagatttcaagcgctttaaggtcaatggcagaaaaggaaatatcttcgtttcaaaactagacagaatcattcccacaaactgcgttgtgatgtgttcgttcaactcacagagtttaacctttcttttcatagagcagttaggaaccagtctgtttgtaaattctgtaagtggatattctgacatcttgtgaccttcgttggaaacgggatttcttcatattctgctagacagaagaattctcagtaacttccttgtgttgtgtgtattgaactcacagagttgaacgatcctttacacagagcagacttgaaacattctttttgtggaatttgcaagtggagatttcagccgctttgaggtcaatggtagaataggaaatatctttctatagaaactagacagaatgattctgagaaactcctttgtgatgtgtgcgttcaactcacagagtttaacctttcttttcatagagcagttaggaaacactctgtttgtaaagtctgcaagtggatattcagacctctttgaggccttcgttggaaacgggatttcttcatattctgctagacagaagaattctcagtaacttccttgtgttgtgtgtattcaactgacagagttgaactttcatttagagagagcagatttgaaacactgtttttgtggaatttgcaagtgtatatttcaagcgctttggggccaaaggcagaaaaggaaatatcttcgtataaaaactagacagaatcattctcagaaactgctctgcgatgtgtgcgttcaactctcagagtttaacttttcttttcattcagcagtttggaaacactctgtttgtaaagtctgcacctggataacttgaccacttagaggcctccgttggaaacgggtttttttcctgtaaggctagacagaagaattcccagtaacttccttgtgttgtgtacattcaactcacagagttgaacgttcccttatacagagcagatttgaaaaactctttttatgcaattggcaagtggtgatttcagccgctttgaggtcaatggtagaaaaggaaataacttcgtataaaaattagacagaatcattcccaaaaactgcgttgtgatgtgttcgttcatctcacagagtttaacctttcttttcatagagcagttaggaaacagtctgtttgtaaattctgtaagtggatattctgacatcttgtggccttcgttggaaacgggatttcttcatattctgctagacagaagaattctcaggaacttccttgtgttgtgtgaattcaactcacagagttcaacgatcctttacacagagcagacttgaaacactctttttgtggaatttgcaagtggagatttcagccgcttttaggtcaatggtagaataggaaatatcttcctatagaaactagacagatgattctcagaaactcctttgtgatgtgtgcgttcaactcacagagtttaacctttcttttcttagagcagttaggaaacactctgtttataatgtctgcaagtggatattcagacccctttgaggccttcgttggaaacgggatttcttcatattatgctagacagaagaattctcagtaacttccttgtgttgtgtgtattcaactgacagagttgaactttcatttagagagagcagatttgaaacactgttgttgtggaatttgcaagtggagatttcaagcgctttgggaccaaaggcagaaaaggaaatatcttcgtataaaaactagacagaatcattctcagaaactgctgcgtgatgtttgcgttcaactctcagagtttaacttttcttttcattcagcggtttggaaacactctgtttgtaaagtctgcacgtggaaattttgaccacttagaggccttcgttggaaaagggtttttttcatgtaaggctagacagaagaattcccagtaacttccttgtgttgtgtacattcaactcacagagttgaacgttcccttagacagagcagatttgaaacactctttttgtgcaattggcaaatggagatttcaagcgctttaagttcaatggcagaaaaggaaatatcttcgtttcaaaactagacagaatcattcccacaaactgcgttgtgatgtgttcgttcaactcacagagtttaaactttctgttcatagagcagttaggaaacactctgtttgtaaagtctgtaagtggatattccgacatcttttggccttcgttggaaacgggatttcttcatattctactagacagaagaattctcagtaactcctttgtgttgtgtgtattcaactcacagagttgaacgatcctttacacagagcagacttgaaacactctttttgtggaatttgcaagtggagatttcagccgctttgaggtcaatggtagaataggaaatatcttcctatagaaactagacagaatgattctcagaaacttctttgtgatgtgtgcgctcaactcacagagtttaacctttcttttcatagagcagttaggaaacactctgtttgtaaactctgcaagtggatattcagacctctttgaggccttcgttggaaacgggatttcttcatattatgcctgagagaagaattctcagtaacttccttgtgttgtgtgtattcaactcacagagttgaacgatcctttacacagagcagacttggaacactctttttgtggaatttgcaagtggagatttcagccgcgttgagatcaatggtagaaaaggaaatatcttcgtataaaaactagacagaatgattctcagaaactcctttgagatgtgtgtgttcaactcacagagtttaacctttcttttcatagagcagttaggaatcactctgtttgtaaagtctgcaagtggatattcagacctctttgaggccttcgttggaaacgggtttttttcatataaggctagacagaagaattctcagtaacttccttgtgttgtgtgtattcaactgacagagttgaactttcatttagagagagcagatttgaaacactgtttttgtggaatttgcaagtggagatttcaagcgctttgtggccaaaggcagaaaacgaaatatcttcgtataaaaactagacagaatcattctcagaaactgctgcgtgatgtgtgcgttcaactctcagagtttaacttttcttttcattcagcggtttggaaacactctgtttgtaaagtctgcacgtggacattttgaccacttagaggccttagttggaaacgggtttttttcatgtaaggctagacagaagaattcccagtaacttccttgtgttgtgtacattcaactcacagagttgaacgttcccttagacagagcagatttgaaacactctttttgtgcaattggcaagtggagatttcaagcgctttgaggtcaatggcagaaaaggaaatatcttcgtttcaaaactagacagattcattcccacaaactgcgttgtgatgtgttcgttcaactcacagagtttaacctttctgttcatagagcagttaggaaacactctgtttgtaaagtctgccagtggatattcagacctccttgaggccttcgttggaaacgggatttcttcatattctgctagacagaagaattctcagtaacttccttgtgttgtgtgtattcaactcacagagttgaacgatcctttacagagagcagacttgaaacactctttttgtggaaattgcaagtggagatttcagctgctttgaggtcaatggtagaataggaaatatcttcctatagaaactagacagaatgattctcagaaactcctttgtgatgtgtgcgttcaactcacagagtttaacctttcttttcatagagcagttaggaaacactctgtttgtaaagtctgcaagtggatattcagacctccttgagggttcgttggaaacgggatttcttcatattatgctagacagaagaattcccagtaacttccttgtgttgtgtgtgttcaactcacagagttgaactttcatttacacagagcagatttgaaacactctttttgtggaatatgcaagtggagatttcaagcgctttgaggccaaaggcagaaaaggaaatatcttcgtttgaaaactagacagatatcattctcagaaactgctgcgtgatgtgtgcgttcaactctcagagtttaacttttcttttcattcagcggtttggaaacactctgtttgtaaagtctgcacgtggatattttgaccacttagaggccttcgttggatacgggttttttttcatgtaaggctagacagaagaattcccagtaacttccttgtgttgtgtgcattcaactcacagagttgaacgttcccttagacagagcagatttgaaacactctatttgtgcaatttgcaagtgtagatttcaagcgctttaaggtcaacggcagaaaaggaaatatcttcgtttcaaaactagacagaatcatacccacaaactgcgttgtgatgtgttcgttcaactcacagagtttaacctttctgttcatagagcagttaggaaacactctgtttgtaaagtctgtaagtggatattctgacatcttgtggccttcgttggaaacgggatttcttcatattctgctagacagaagaattctcagaatcttccttgtgttgtgtgtattcaactcacagagttgaacgatcctttacacagagcagacttgaaacactctttttgtggaatttgcaagtggagatttcagccgctttgaggtccatggtagaaaaggaaatatcttcggtataaaaactagacagaatgattctcagaaactcctttgagatgtgtgtgttcaactcacagagtttaacctttcttttcatagagcagttaggaatcactctgtttgtaaagtctgcaagtggatattcagacctctttgaggccttcgttggaaacgggtttttttcatataaggctagagagaagaattcccagtaacttccttgtgttgtgtgtgttcaacccacagagttgaacttccatttacacagagcagatttgaaacactctttttgtggaatttgcaagtggagatttcaagcgctttgaggccaaaggcagaaaaggaaatatcttcgtttcaaaactagacagaatcattctcagaaactgctctgcgatgtgtgcgttcaactctcagagtttaacttttcttttcattcagcagtttggaaacactctgtttgtaaagtctgcacgtggataatttgaccacttagaggccttctttggaaacgggtttttttcatataaggctagacagaagaattcccagtaacttccttgtgttgtgtacattcaactcacagagttgaacgttcccttagacagagcagatttgaaacactctttttgtgcaattagcaagtggagatttcaagcgctttaaggtcaatggcagaaaaggaaatatcttactttcaaaactagacagaatgattctcagaaacttctttgtgatgtgtgcgttcaactcacagagtttaacctttcttttcatagagcagttaggaaacactctgtttataaactctgcaagtggatattcagacctctttgaggccttcgttggaaacgggatttcttcatactgtgctagacagaagaattctcagtaacttccttgtgttgcgtgtattcaactcacagagttgaacgatcctttacacagagcgggcttgaaacactctttttgtggaatttgcaagtggagatttcagccgcgttgaggtcaatggtagaaaaggaaatatcttcgtataaaaactagacagaatgattctcataaactcctttgtgatgtgtgaattcaactcacagagtttcacctttcttttcatagagcagttaggaaacactctgtttgtaaagtctgcaagtggatattcagacctccttgaggccttcgttggaaacgggatttcttcatattctgctagacagaagcaattcccactaacttccttgtgttgtgtgtgttcaactcacaggagttgaactttcatttacacagagcagatttgaaacactctttttgtggaatttgaaagtggagatttcaagcgctttgaggccaaaggcagaaaaggaaatatcttcgtttcaaaactagacagaatcattctctgaaactgctgcgtgatgtgtgcgttcaactctcaaagtttaacttttcttttcattcagctgtttggaaacactctgtttgtaaagtctgtacgtggaaattttgaccacttagaggccttcgttggaaacgggtttttttcatgtaaggctagacagaagaattcccagtaacttccttgtgttgtgtacattcaactcacagagttgaacgttcccttagacagagcagatttgaaacactctttttgtgcaattggcaagtggagatttcaagcgctttaaggtcaatggcagaaaaggaaatatcttcgtttcaaaactacacagaatgattctcagaaactcctttgtgatgtgtgcattcaactcacagagtttaacctttcttttcatagagcagttaggaaacactctgtttgtaaagtctgcaagtggatattcagacatctttgaggctttcgttggaaacgggatttcttcatattctgctagaaagaagaattctcagtaacttccttgtgttgtgtgtattcaactcacagacttgaatgatcctttacacagaacagtcttgaaagactctttttgtggaatttgcaagtggagatttcagccgctttgaggtcaatggtagaataggaaatatcttccaatagaaactagacagaatgactctcagaaactcctttgtgatgtgtgtgttcaactcacagagtttaacctttcttttcatagagcagttagtaaacactctgtttataaagtctgcaagtggatattcagacccctttgaggccttcgttggaaacgggatttcttcatattctgctagacagaagaattcccagtaacttccttgtgttgtgtgtgttcaactcacagagttgaactttcatttacacagagcagatttgaaacagtctttttgtggaatttgcaagtggagatttcaagcgctttgaggccaaaggcagaaaaggaaatatcttcgtataaaaactagacagaatcattctcagaaactgctgcgtgatgtgtgcgttcaactctcagagtttaacttttcttttcattcagcggtttggaaacactctgtttgtaaagtctgcacgtggatattttgaccactcagaggccttcgttggaaacgggtttttttcatgtaaggctagacagaagaattcccagtaacttccttgtgttgtgtacattcaactcacagagttgaacgttcccttagacagaacagatttgaaacactctttttgtgcaattggcaagtggtgatttcagccgctttggggtcaatggtagaaaaggaaatatcttcgtataaaaactagacagaatgattctcagaaactcctttgtgatgtgtgcgttcaactcacagagtttaacctttcttttcatagagcagttaggaaacactctgtttgtaaagtctgcaagtggatattcagacctctttgaggccttctttggaaacggcatttcttcatattatgctagacagaagaattctcagtaacttccttgtgttgtgtgtatgcaactcacagagttgaacgatcctttacacagagcagacttgaaacactctttttgtggaatttgcaagtggagatttcagccgctttgaggtcaatggtagaataggaaatatcttcctatagaaactagacagaatgattctcataaactcctttgtgatgtgtgcgttcaactcacagagtttaacctttcttttcatagagcagttaggaaacactctgtttgtaaagtctgcaagtggatattcagacctccttgagaccttcgttggaaacgggatttcttcatattatgctagacagaggaattctcagtaacttccttgtgttgtgtgtattcaactgacagagttgaactttcatttagagagagcagatttgaaacactgtttttgtggaatttgcaagtggagatttcaagcgctttggggccaaaggcagaaaaggaaatatcttcgtataaaaactagacagaatgattctcagaaactgctctgcgatgtgtgcgttcaactctcagagtttaacttttcttttcattcagcagtttggaaacactctgtttgtaaagtctgcacgtggatattttgaccacttggaggccttcgttggaaacgggtttttttcctgtaaggctagacagaataattcccagtaacttccttgtgttgagtacattcaactcacagagttgaacgttcccttagacagagcagatttgaaacactctttttgtgcaattgacaagtggagatttcaagcgctttaaggtcactggcagaaaaggaaatatcttcgtttcaaaagtagacagaatgattcccacaaactgcgttgtgatgtgttcgttcaactcacagagtttaacctttcttttcatagagcagttaggaaacactctgtttgtaaattctgtaagtggatattctgaaatcttgtggccttcgttggaaacgggatttcttcatattctgctagacagaagaattcccagtaacttccttgtgttgtgtacattcaactcacagagttgaacgttcccttagacagagcagacttgtaacactctttttgtgcaatttgcaagtggagatttcagccgctttgaagtcaaaggtagaaaaggaaatatcttcctataaaaactagacagaatgattctcataaactcatttgtgatgtgtgcattcaactcacagagtttcacctttcttttcatagagcagttaggaaacactctgtttgtaaagtctgcaagtggatattcagacctccttgaggccttcgttggaaacgggatttcttcatattctgctagacagaagaattctcagtaacttccttgtgttgtgtgtattcaactgacagagttgaactttcatttagagagagcagatttgaaacactgtttttttggaatttgcaagtggagatttcaagcgcttttgggccaaaggcagaaaaggaaatatcttcgtataaaaactagacagaatgattctcagaaactcctttgtgatgtgtgcattcaactcacagagtttaaccattcctttcatagagcagttaggaaacactctgtttgtaaagtctgcaagtggatattcagacctctttgaggccttcgttggaaacgggatttcttcatattctgctagacagaagaattctcagtaacttccttgtgttgtgtgtattcaactcacagagttgaacgatcctttacacagagcagacttgaaacactctttttgtggaatttgaaagtggagatttcagccgctttgaggtcaatggtagaaaaggaaatatcttcgtataaaaactagacagaatgattctcagaaactcctttgtgatgtgtgcgttcaactcacagagtttaacctttcttttcatagagcagttaggaaacactctgtttgtaaagtctgcaagtggatattcagacctccttgaggctttcgttggaaacgggatttcttcatattctgctatacagaagaattctcagaaacttccttgtgttgtgtgttttcaactcacagagttgaacgatgctttacacagagtagacttgaaacactcttgttgtggaatttgcaagtggagatttcagccgctttgaggtcaatggtagaataggaaatatcttcctatagaaactagacagaatgattctcagaaactcctttgtgatgtgtgtgttcaactcacagagtttaacctttcttttcatagagcagttagtaaacactctgtttataaagtctgaaagtggatattcagacccctttgaggccttcgttggaaaagggatttcttcatattatgctagacagaagaattcccagtaacttccttgtgttgtgtgtgttcaactcacagagttgaactttcatttacacagagcagatttgaaacactctttttgtggaatttgcaagaggagatttcaagcgctttgaggccaaaggcagaaaaggaaatatcttcgtataaaaactagacagaatcattctcagaaactgctctgcgatgtgtgcgttcaactctcagagtttaacttttcttttcattcagaagtttggaaacactctgtttgtaaagtctgcacgtggataacttgaccacttagaggccttcgttggaaacggttttttttcatgtaaggctagacagaagaattcccagtaacttccttgtgttgtgtacattcaacacacagagttgaacgtttccttagagagagcagatttgaaacactctttttgtgcaattggcaagtggtgatttcagccgctttgaggtcaatggtagaaaaggaaatatcttcgtataaaaactagacagaatcattcccacaaactgcgttgtgatgtgttcgttcatctcacagagtttaacctttcttttcgtagagcagttaggaaacagtctgtttgtaaattctgtaagtggatattctgacatcttgtggccttcgttggaaacgggatttcttcatattctgctagacagaggaattctcagaatcttccttgtgttgtgtgtattcaactcacagagttgaacgatcctttacacagagcagacttgaaacactctttttgtggaatttgcaagtggagatttcagccgctttgaggtccatggtagaaaaggaaatatcttcgtataaaaactagacagaatgattctcagaaactcctttgtgatgtgtgcgttcaactcacagagtttaacctttcttttcatagagcagttaggaaacactctgtttgtaaagtctgcaagtggatattcagacctctttgaggccttcgttggaaacgggtttttttcctgtaaggctagacagaagaattcccagtaacttccttgtgttgtgtacattcaactcacagatttgaacgttcccttagacagagcagatttgaaacactctttttgtgcaattggcaagtggagatttcaagcgctttaaggtcaatggcagaaaaggaaatatcttcgtttcaaaactagacagaatcattcccacaaactgcgttgtgctgtgttcgttcaactcacagagtttaacctttgttttcatagagcagttaggaaacagtctgtttgtaaattctgtaagtggatattctgacatcttgtggccttcgttggaaacgggttttcttcatattctgctagacagaagaattcccagtaacttccttgtgttgtgtacattcaactcacagagttgaacgttcccttagacagagcagatttgaaacactctttttgtgcaattggcaaatggagatttcaagcgctttaagttcaatggcagaaaaggaaatatcttcgtttcaaaactagacagaatcattcccacaaactgcgttgtgatgtgttcgttcaactcacagagtttaacctttccgttcatagagcagttaggaaacacactgtttgtaaagtctgtaagtggatattctgacatcttgtggccttcgttggaaacgggatttcttcatattctgctagacggaaggaattctcagtaacttccttgtgttgtgtgtattcaacttacagagttgaacgatttcttacacagagcagagttgaaacactctttttctggaatttgcaagtggagattacagccgctttgaggtcaatggtagaataggaaatatgttcctatagaaactagacagaacgattctcagaaactcctttgtgatgtgtgcgttcaactcacagagtttaacctttcttttcatagagcagttaggaaacactctgtttgtaaagtctgcaagtggatattctgacctctttgaggccttcgttggaaacgggatttcttcatattctgctagacagaagaattcccagtaacttccttgtgttgtgtgtgttcaactcacagagttgaactttcatttacacagagcagatttgaaacactctttttgtggaatttgcaagtggagatttcaagcgctttgagaccaaaggcagaaaaggaaatatcttcgtttcaaaactagacagaatcattctcagaaactgctctgtgatgtgtgcgttcaactctcagagtttaacttttcttttcattcagcagtttggaaacactcagtttgtaaagtctgcacgtggatattttgaccacttagaggtcttcgttggaaacgggtttttttcatgtaaggctagacagaagaattcacagtaacttccttgtgttgtgtacattcaactcacagagttgaacgttcccttagacagagcagatttgaaacactctttttgtgcaattggcaagtggagatttcaagcgctttaaggtcaatggcagaaaaggaaatatcttcctttcaaaactagacagaatgattctcagaaactcctttgtgatgtgtgcgttcaactcacagagtttaacctttcttttcatagagcagttaggaaacactctgtttgtaaagtctgcaagtggatatgcagacatccttgaggctttcgttggaaacgggatttcttcatattctgctagaaagaagaattctcagtaacttcctcgtgttgtgtgtattcaactcacagagttgaacgatcctttacacagagcagacttgaaacactctttttgtggaatttgcaagtggagatttcagccgctttgaggtcaatggtagaataggaaatatcttcctatagaaactagacagaatgattctcagaaactcctttgtgatgtgtgcgttcaactcacagagtttaacctttctgttcatagagcagttaggaaacactctgtttgtaaagtctgcaagtggatattcagacccctttgaggccttcgttggaaacgggatttcttcatattctgctagacagaagaattcgcagtaacttccttgtgttgtgtgtattcaactcacagagtttaacgatcctttacacagagcggacttgaaacactctttttgtggaatttgcaagtggagatttcagccgctttgaggtcaatggtagaaaaggaaatatcttcgtataaagactagacagaatgattctcataaactcctttgtgatgtgtgcgttcaactcacagagtttaacttttcatttcatagagcagttaggaaacactctgtttgtaatgtctgcaagtggatattcagacctctttgaggccttcattggaaacgggatttcttcatattatgctagacagaagaattctcagtaacttccttgtgttgtgtgtattcaactcacagagttgaacgatcctttacacagagcagacttggaacactctttttgtggaatttgcaagtggagatttctgccgcgttgaggtcaatggtagaaaaggaaatatcttcgtataaaaactagacagaatgattctcagaaactcctttgagatgtgtgtgttcaactcacagtttaacctttcttttcatagagcagttaggaatcactctgtttgtaaagtctgcaagtggatatacagacctctttgaggccttcgttggaaacgggtttttttcatataaggctagacagaagaattcccagtaacttccttgtgttgtgtgtgttcaactcacagagttgaactttcatttacacagagcagatttgaaacactctttttgtggaatttgcaagtggagatttcagccgctttgaagtcaaatgtagaaaaggaaatatcttcctataaaaactagacagaatgattctcagaaactcctttgtgatgtgtgcgttcaactcacagagtttaacctttcttttcatagagcagttagggaacactctgtttgtaaagtctgcaagtggatattcagacctctttgaggccttcgttggaaacgggatttcttcatattatgctagacagaagaattcccagtaacttgccttgtgttgtgtgtgttcaactcacagagttgaactttcatttacacagagcagatttgaaacactaattttgtggaatttgcaagtggagatttcaagcgctttgaggccaaaggcagaaaaggaaatatcttcgtataaaaactagacagaatcattctcagaaactgctgcgtgatgtgtgcgttcaactctcagagtttaacttttcttttcattcagcggtttggaaacactctgtttgtaaagtctgcacgtggatattttgaccacttagaggccttcgttggaaacgggtttttttcatgttaggctagacagaagaattcccaggaacttccttgtgttgtgtacattcaactcacagagttgaacgttcccttagacagagcagatttgaaacactctttttgtgcaattggcaagtggtgatttcagcagctttgaggtcaatggtagaaaaggaaatatcttcgtataaaaactagacagaatcattcccacaaactgcgttgtgatgtgttcgttcaactcacagagtttaacctttcttttcatagagcagttaggaaacagtctgtttgtcaattctgtaagtggatattctgacatcttgtggccttagttggaaacgggatttcttcatattctgctagacagaagaattctcagtaacttccttgtgttgtgtgtattcaactcacagagttgaacgatcctttacacagagcagacttgaaacactctttttgtggaatttgcaagtggagatttcagccgctttgggttcaatggtagaataggaaatatcttcctatagaaactggacagaatgattctcagaaactcctttgtgaagtgtgcgttcaactcacagagtttaacctttctttccatagagcagttaggaaacactctgtttgtaaagtctgcaagtggatattcagacctctttgaggccttcgttggaaacgggatttcttcatattctgctagacagaagaattctcagtaacttccttgtgttgtgtgtattcaactgacagagttgaactttcatttagagagagcagatttgaaacactgtttttgtggaatttgtaagtggagatttcaagcgctttggggccaaaggcagaaaaggaaatatcttcgtataaaaactagacagaatcgttctcagaaactgctctgcgatgtgtgcgttcaactctcagagtttaacttttcttttcattcagcagtttggaaacactctgtttctaaagtctgcacgtggataatttgaccacttagaggccttcgttggaaacgggtttttttcatgtaaggctagacagaagaattctcagtaacttccttgtgttgtgtgtattcaactcacagagttgaacgatcctttacaaagagcagatttgtaacactctttttgtggaatttgcaagtggagatttcaagcgctttaaggtcaatggcagaaaaggaaatatcttcgtttcaaaactagatagaatcattcccacaaactgcgttgtgatgtgttcgttcaactaacagagtttaacctttcttttcatagagcagttaggaaacagtctgtttgtaaattctgtaagtggataatctgacatattgtggcctttgttggaaacaggatttcttcttattctgctagacagaagaattctcagtaacttccttgtgttgtgtgtattcaactcacagagttgaacgatcctttacacagagcagacttgaaacactctttttgtggaatttgcaaatggagatttcagccgctttgaggtcaatggtagaataggaaatatcttcctatagaaactagacagaatgattctcataaactcctttgtgatgtgtgcgttcaactcacagagtttaacctttcttttcatagagcagttaggaaacactctgtttgtaaagtctgcaagtggatattcagaccctcttgaggccttcgttggaaacgggatttcttcatattctgctagacagaagaattctcagtaacttcccttgtgttgtgtgtgttcaactcacagagttgaactttcatttacacagagcagattggaaacactctttttgtggaatttgcaagtggagatttcaagcgctttgaggccaaaggcagaaaaggaaatatcttcgtataaaaactagacagaatcattctcagaaactgctctgcgatgtgtgcgttcaactctcagagttttactttgcttttcattcagcagtttggaaacactctgtttgtaaagtctgcacgtggataatttgaccacttagaggccttcgttggaaacgggtttttttcatgtaaggctagacagaagaattcccagtaacttccttgtgttgtgtacattcaactcacagagttgaacgttcccttagacagagcagatttgaaacactatttttgtgcaattggcaaatggagatttcaagggctttaaggtcaatggcagaaaaggaaatatcttcgtttcaaaactagacagaatgattctcataaactcctttgtgatgtgtgcgttcaactcacagagtttaacctttctgttcatagagcagttaggaaacactctgtttgtaaagtctgcaagtggatattcagacctccttgaggccttcgttggaaaagggatttcttcatattctgctagacagaagaattctcagtaacttccttgtgttgtgtgtattcaactcacagagttgaacgatcctttacacagagcagacttcaaacactctttttgtggaatttgcaagtggagatttcagccgctttgaggtcaatagtagaaaaggaaatatcttcgtagaaaaactaggcagaatgattcccagaaactcctttgtgatgtgtgcattcaactcacagagtttaacttttcttttcatagagcagttaggaaacactctgtttgtaaagtctgcaagtggatattcagacctctttgaggccttcgttggaaacgggatttcttcatattatgctagacagaagaattcccagtaacttccttgtgttgtgtgtgttcaactcacagagttgaactttcatttagacagagcagatttgaagcactctttttgtggaatttgcaagtggagatttcaagcgctttgaggccaaaggcagaaaaggtaatatcttcgtttcaaaactagccagaatcattctcagaaactgctctgcgatgtgtgcgttcaactctcagagtttaacttttcttttcattcagcagtttggaaacactctgtttgtaaagtctgcacgtggataatttgaccacttagaggccttcgttggaaacgggtttttttcatgcaaggctagacagaagaattcccagtaacttccttgtgttgtgtacattcaactcacagagttgaacgttcccttagacagagcagatttgaaacactctttttgtgcaattggcaagtggagatttcaagagttttaaggtcaatggcagaaaaggaaatatcttcgtttcaaaactagacagaatcattcccacaaactgcgttgtgatgtgttcgttcaaatcacagagtttaacctttcttttcatagagcagttaggaaacagtctgtttgtaaattctgtaagtggatattctgacatcttgtggccttcgttggaagcgggatttcttcatattctgctagacagaagaattctcagtaacttccttgtgttgtgtgtattcaactcacagaggtgaacgatcctttacagagagcagacttgaaacactctttttgtggaatttgcaagtggagatttcagccgctttgaggtcaatggtagaataggaaatatcttcctatagaaactagacagaatgattctcagaaactcctttgtgatgtgtgcgttcaactcacagagtttaaccttccttttcatagagcagttaggaaacactctgtttgtaaagtctgcaagtggatattcagacctctttgaggccttcgttggaaacgggtttttttcatataaggctagacagaagaattcccagtaacttccttgtgttgtgtgtgttcaactcacaaagttgaactttcatttacacagagcagatttgaaacactctttttgtggaatttgcaagtggagatttcaagcgctttgaggccaaaggcagaaaaggaaatatctccgtttcaaaactagacagaatcattctcagaaactgctctgtgatgtgtgcgttcatctcacagggtttaacttttcttttctttcagcagtttggcaacactctgtttgtaaaatctgcacgtggatattttgaccacttagaggccttcgttggaaacgagtttttttcatgtaaggcaatacagaagaattcccagtaacttcccttgtgttgtgtgcattcaactcacacagatgaacgttcccttagacagagcagatttgaaacactctatttgtgcaatttgcaagtgtagatttcaagcgctttaaggtcaatggcagaaaaggaaatatcttcgtttcaaaactagacagaatcattcccacaaactgcgttgtgatgtgttcgttcaactcacagagtttaacctttctgttcatagaccagttaggaaccactctgcttgtaaagtctgtaagtggatattctgacgtcttgtggccttaattggaaatgggatttcttcgtattctgctagacagagaattctcagtaactgccttgtgttgtgtgtattcaactcacagagttgaacgatcctttacacagagcagacttgaaacactctttttgtggaatttgcaagtggagatttcagccgctttgaggtcaatggtagaataggaaatatcttcctatagaaactagacagaatgattctcagtaagttctttgtgatgtgtgcgttcaactcacagggttcaacctttcttttcatagagcagttaagaaacactctgtttgtaaagtcttcaagtggatattcatacctctttgaggccctcgttggaaacgggatttcttcatattatgctagacagaagaattctcagtaacttccttgtgttgtgtgtattcaactgacagagttgaactttcatttagagagagcagatttgaaactctgtttttgtggaatttgcaagtggagatttcaagcgctttggggccaaaggcagaaaaggaaatatcttcgtataaaaactagacagaatcattctcagaaactgctctgcgatgtgtgcgttcaactctcagagtttaacttttcttttcattcagcagtttggaaacactctgtttgtaaagtctgcacgtggatattttgaccatttagaggccttcgttggaaacgggtttttttcttgtaaggctagacagaagaattcccagtaactttccttgtgttgtgtacattcaactcacagagttgaacgttcccttagacagagcagatttgaaacactctttttgtgcaattggcaaatggagatttcaagcgctttaagttcaatggcagaaaaggaaatatcttcgtttcaaaactagacagaatgattctcagaaactcctttgagatgtgtgcgttcaactcacagagtttaacctttcttttcatagagcagttaggaaacactctgtttgtaaactctgcaagtggatattcagacctctttgaggctttcgttggaaacgggatttcttcatactatgctagacagaagaattctcagtaacttccgcgtgtacagagcagacttgaaacactctttttgtggaatttgcaagtggagatttcagccgctttgaggtcaatggtagaaaaggaaatatcttcctataaaaactagacagaatgattctcagaaactcctttgtgatgtgtgcgttcaactcacagagttcaacctttcttttcatagagcagttgggaaacactctgtttgtaaagtctgcaagtggatattcagacttctttgaggcctccgttggaagagggatttcttcatattctgctagacagaagaattcccagtaacttccttgtgttgtgtgtgttcaactcacagagttgaactttcatttacccagagcagatttgaaaccctctttttgtggaatttgcaagtggagatttcaagcactttgaggccaaaggcagaaaaggaaatatcttcgtttcaaaactagacagaatcattctcagaaactgctctgcgatgtgtgcgttcaactctcagagtttaacttttcttttcattcagcagtttggaaacactctgtttgtaaagtctgcacgtggatattttgaccacttataggccttcgttggaaacgggtttttttcctgtaaggctagacagaagaattctcagtaacttccttgtgttgtgtacattcaactcacagagttgaacgttcccttagacagagcatatttgaaacactctttttgtgcaattggcaagtggagatttcaagcgctttaaggtcaatggcagaaaaggaaatatcttcgtttcaaaactagacagaatcattcccacaaactgcgttgtgatgtgttcgttcaactcacagagtttaacttttctgttcatagagcagttaggaaacactctgtttgtaaagtctgtaagtggatattctgacatcttgtggccttcgttggaaacgggatttcttcctattctgctagacagaagaactctcagtaacttccttgtgttgtgtgtattcaactcacagagttgaacgatcctttacacagagcagacttgaaacattcttttcgtggaatttgcaactggtgatttcagccgctttgaggtcaatggtagaataggaaatatcttcctatagaaactagacagaatgattctcagaaactcctttgtgatgtgtgcgttcaactcacagagtttaaccttttttttcatagagcagttaggaaacactctgtttgtaaagtctgcaagtggatattcagacgtctttgaggccttcgttggaaacgggatttcttcatactatgctagacagaagaattcccagtaacttccttgtgttgtgtgtgttcgactcacagagttgaactttcatttacacagagcagatttgaaacactctttttgtggaatttgcaagtggagatttcaagcgctttgaggccaaaggcagaaaaagaaatatcttcgtttcaaaactagacagaatcattctcagaaactgttctgcgatgtgtgcgttcaactctcagagtttaacttttcttttcattcagcagtttggaaacactctgtaaactctgcatgtggatattttgaccacttagaggccttcgttggaaacgggtttttttcctgtaaggctagacagaagaattcccagtaacttccttgtgttgtgtacattcaactcacagagttgaacgttcccttagacagagcagatttgaaacactctttttgtgcaattggcaagtggtgatttcagccgctttgaggtcaatggtagaaaaggacatatcttcgtataaaaactagacagaatcattcccacaaactgcgttgtgatgtgttcgttcaactcacagagtttaacctttcttttcatagagcagttaggaaacaagtctgtttgtcaattctgtaagtggatattctgacatcttgtggccttcgttggaaacgggatttcttcatattctgctagacagaagaattctcagaatcttccttgtgttgtgtgtattcaactcacacagttgaacgatggtttacacagagcagatttgaaacactctttttgtggagtttggaagtggagatttcagccgctttgaggtcaatggtagaaaaggaaatatcttcgtataaaaactagacagaatgattctcacaaactcctttgtgatgtgtgcgttcaactcacagagtttaagctttcttttcatagagcagttgggaaacactctgtaaagtctgcaagtggatattcagacctctttgaggctttcgttggaaacgggatttcttcatattctgctagacagaagaattctcagtaacttccttgtgttgtgtgtattcaactcacagagttgaccgatcctttacacagagtagacttgtaacactctttttgtggaatttgcaagtggagatttcagccgctttgaagtcaaaggtagaaaagggaatatcttcctataaaaactagacagaatcattctcataaactgctgcgtgatgtgtgcgttcaactctcagagtttaacttttcttttcattcagcggtttggaaacactctgtttgtaaagtctgcacgtggatattttgaccacttagacgccttcgttggaaacgggtttttttcatgtaaggctagacagaagaattcccagtaacttccttgtgttgtgtacattcaactcacagagttgaacgttcccttagacagagcagatttgaaacactctttttgtgcaattggcaagtggagatttcaagcgctttgaggtcaatggcagaaaaggaaatatcttcgtttcaaaactagacagaatcattgccacaaactgcgttgtgatgtgttcgttcaactcacagagtttaacctttcttttcatagagcagttaggaaacagtctgtttgtaaattctgtaagtggatattctgacagcttgtggccttcgttggaaacgggatttcttcatactatgctagacagaagaattctcagaatcttccttgtgttgtgtgtattcaactcaccgagttgaacgatcctttacacagagcagacttgaaacactctttttgtggaatttgcaagtggagatttcagccgctttgaggtccatgttagaaaaggaaatatcttcgtacaaaaactagacagaatgattctcagaaacttctttgtgatgtgtgccttcaactcacagagtttaacctttcttttcatagagcagttaggaaacactctgcttgtaaactctgcaagtggatattcagacctctttgaggccttcgttggaaacgggatttctccatactatgctagacagaagaattcccagtaacttccttgtgttgtgtgtgttcaactcacagagttgaactttcatttacacagagcagatttgaaacactctttttgtggaatttgcaaatggagatttcaagcgctttgaggccgaaggcagaaaaggaaatatcttcgtataaaaactagacagaatcattctcagaaactgctctgcgatgtgtgcgttcaactctctgagtttaacttttcttttcattcagcagtttggaaacactctgtttgtaaagtctgcacgtggataacttgaccacttagaggccttcattggaaacgggtttttttcatgtaaggctagacagaagaattcccagtaacttccttgtgttgtgtgcattcaactcacagagttgaacgttccttagacagagcagatttgaaacactctatttgtgcaatttgcaagtgtaggtttcaagcgctttaaggtcaatggcagaaaaggaaatatcttcgtttcaaaactagacagaatcattcccacaaactgcgttgtgatgtgttcgttcaactcacagactttaacctttcttttcatagagcagttaggaaacactctgtttgtaaagtctgtaagtggatattctgacatcttgtggccttcgttggaaacgggatttcttcatattctgctagacagaagaattctcagtaacttccttgtgttgtgtgtattcaactcacagagttgaacgatcctttacacagagcagacttgaaacactctttttgtggaatttgcaagtggagatttcagccgctttgaggtcaatgatagaaaaggaaatatcttcgtataaagactagacagaatgattctcagaaactcctttgtgatgtgtgcgttgaattcacaaaatttaacatttcttttcatagagcagttaggaaacaccctgtttgtaaagtctgcaagtggatattcagacctctttgaggccttcgttggaaacgggatttcttcatattctgctagacagaagaattcccagtaacttccttgtgttgtgtgtgttcaactcacagagttgaactttcatttacacagagcagatttgaaacactctttttgtggaatttgcaagtggagatttcaagcgctttggggccaaaggcagaaaaggaaatatcttcgtataaaaactagacagaatcattctcagaaactgctctgcgatgtgtgcgttcaactctcagagtttaacttttcttttcattcagcagtttggaaacactctgtttgttaagtctgcacgtggatattttgaccacttagaggccttcgttggaaacgggtttttttcctgtaaggcttgacagaagaattcccagtaacttccttgtgttgtgtacattcaactcacagagttgaacgttcccttagacagagcagatttgaaacactctttttgtgcaattggcaagtggtgatttcagccgctttgaggtcaatggtagaaaaggaaatatcttcgtataaaaactagacagaatgattctcagaaacttcattgtgatgtgtgcgttcaactcacagagtttaacctttcttttcatagagcagttaggaaacactctgtttgtgaactctgcaagtggatattcagacgtctttgaggccttcgttggaaatgggatttcttcatactgtgctagacagaagaattctcagtaacttccttgtgttgtgtgtattgaactcgcagagttgaacgatcctttacacagagcagacttgaaacactctttttgtggaatttgcaagtggagatttcagccgctttgaggtcaatagtagaaaatgaaatatcttcgtagaaaaactagacagaatgattctcataaactcctttgtgatgtgtgcgttcaactcacagagtttaacttttcttttcatagcagcagttaggaaacactctgtttgtaaagtctgcaagtggatattcagacctctttgaggccttcgttggaaacgggatttcttcatattctgctagacagaagaattctcagtaacttccttgtgttgtgtgtattcaactcacagacttgaacgatcctttacacagagcagacttgaaacactctttttgtggaatttgcaaatggagatttcagccgctttgaggtcaatagtagaaaaggaaatatcttcgtagaaaaactagacagaatgattctcagaaaatcttttgtgatctgtgcgttcaactcacagagtttaacttttcttctcatagagcagttaggaaacactctgtttgtaaagtctgcaagtggatattcagacctctttgaggccttcgttggaaacgggatttcttcatattctgctagacagaagaattcccagtaacttccttgtgttgtgtgcattcaactcacagagttgaacgttcacttagacagagcagatttgaaacactctatttgtgcaatttgcaagtgtagatttcaagcgctttaaggtcaacggcagaaaaggaaatatcttcgtttcaaaactagacagaatcattcccacaaactgcgttgtgatgtgttcgttcaactcacagagtttaacctttcttttcatagagcagttaggaaacagtctgtttgtcaattctgtaagtggatattctgacatcttgtgtccttagttggaaacgggatttcttcatattctgctagacagaagaattctcagtaacttccttgtgttttgtgtattcaactcacagagttgaacgatccttttcacagagcagacttgaaacactctttttgtggaatttgcaagtggagatttcagccgctttgaggtcaatagtagaaaaggaaatatcttcgtagaaaaactagacagaatgattctcagaaactcctttgtgatgtgtgcgttcaactcacagagtttaacctttcttttcatagagcagttaggaaacactctgtttgtaaagtctgcaagtggatattcagacctctttgaggccttcgttggaaacgggattttttcatataaggctagacagaagaattctcagtaacttccttgtgttgtgtgtattcaactgacagagttgaactttcatttagagagagcagatttgtaagactgtttttgtggaatttgcaagtggagatttcaagcgctttgcggccaaaggcagaaatggaaatatcttcgtataaaaactagacagaatcattctcagaaaatcctctatgatgtgtgcgttcaactctcagagtttaacttttcttttcattcagcagtttgaaaacactctgtttgtaaagtctgcacgtggatattttgaccacttagaggccttcgttggaaacgggtttttttcatgtaagggtagacagaagaattcccagtaacttccttgtgttgtgtgcattcaactcacagagttgaaagttcccttagacagagcagatttgaaacactctatttgtgcaatttgcaagtgtagacttcaagcgctttaaggtcaacggcagaaaaggaaatatcttcgtttcaaaactagacagaatgattctcagaaactcctttgtgatgtgtgcgttcaactcacagagtttaacctttcttttcatagagcagttaggaaacactctgtttgtaaagtctgcaagtggatattcagacctctttgaggccttcgttggaaacgggttttcttcatattctgctagacagaagaattctcagtaacttccttgtgttgtgtgtattcaactcacagagttgaacgatcctttacacagagcagtcttgaaacactctttttgtggaatttgcaagtggagatttcagccgctttgaggtcaatagaagaaaaggaaatatcttcgtagaaaaactaggcagaatgattctcagaaactcctttgtgatgtgtgcgttcaactcacagagtttaacctttcttttcatagagcagttaggaaacactctgtttgtaaagtctgcaagtggatattcagacatccttgaggctttcgttggaaacgggatttcttcatattctgctagaaaaaagaattctcagtaacttccttgtgttgtgtgtattcaactcatagagttgaacgatcctttacacagagcagacttgtaacactctttttgtggaatttgcaagtggagatttcaagcgctttgaggccaaaggcagaaaaggaaatatcttcgtttcaaaactagacagaatcattctcagaaactgctctgcgatgtgtgcgttcaactctcagagtttaacttttctttagcattcagcagtttggaaacactctgtttgtaaagtctgcacgtggatattttgaccacttagaggccttcgttggaaacgggtttttttcctgtaaggctagacagaagaattcccagtaacttccttgtgttgtgtgcattcaactcacagagttgaacgttcccttggacagagcagatttgaaacactctatttgtgcaatttgcaagtgtagatttcaagcgctttaaggtcaacggcagaaaaggaaatatcttcgtttcaaaactagacagaatcattcccacaaactcgcgttgtgatgtgttcgttcaactcacagagtttaacctttctgttcatagagcagttaggaaacactcagtttgtaaagtctgtaagtggatattctgacatcttgtggccttcgttggaaacgggatttcttcatattctgctagacagaagaattctcagaatcttccttgtgttgtgtgtattcaactcacacagttgaacgatggtttacacagagcagatttgaaacactctttttgtggaatttgcaagtggagatttcagccgctttgaggtcaatggtagaaaatgaaatatcttcgtataaaaactagacagaatgattctcataactcctttgtgatgtgtgcgttcaactcacagagttcaacctttcttttcatagagcagttgggaaacactctgtttgtaaagtctgcaagtggatattcagacttctttgaggccttcgttggaagcgggatttcttcatattctgctagacagaagaattctcagtaactgccttgtgttgtgtgtattcaactcacagagttgaacgatcctttacacagagaagacttgaaacactctttttgtggaatttgcaagtggagatttcagccgctgtgaggtcaatggtagaataggaaatatcttcctatagaaactagacagaatcattctcagaaactgctgcgtgatgtgtgcgttcaactctcagagtttaacttttcttttcattcagcggtttggaaacactctgtttgtaaagtctgcacgtggatattttgaccacttagaggccttcgttggaaacgggtttttttcatgtaaggctagacagaagaattcccagtaactttccttgtgttgtgtgcattcaactcacagagctgaacgttcccttagacagagcagatttgaaacactctatttgtgcaatttgcaagtgtagatttcaagcgctttaaggtcaatggcagaaaaggaaatatcttcgtttcaaaactagacagaatcattcccagaaactgcgttgtgatgtgttcgttcaactcacagagtttaacctttctgttcatagagcagttaggaaacactctgtttgtaaagtctgtaagtggatattctgacatcttgtggccttcgttggaaacgggatttcataatattctcctagacagaagaattctcagaatcttccttgtgttgtgtgtattcaactcacagagttgaacgatggtttacacagagcagatttgaaacactcttttggtggaatttgcaagtggagatttcagccgctttgaggtcaatggtagaaaaggaaatatcttcgtataaaaactagacagaatgattctcagaaactcctttgtgatgtgtgcgttcaactcacaaagtttaacctttcttttcatagagcagttaggaaacactctgtttgtaaagtctgcaagtggatattcagacctctttgaggccttcgttggaaacgggatttcttcatattctgctagacagaagaattctcagtaacttccttgtgttgtgtgtattcaactgacagagttgaactttcatttagagagagcagatttgaaacactgtttttgtggaatttgcaagtggagatttcaagcgctttggggccaaaggcagaaaaggaaatatcttcgtataaaaactagacggaatcattctcagaaactgctgcgtgatgtgtgcgttcaactctcagagtttaacttttcttttaattcagcggtttggaaacactctgtttgtaaagtctgcacgtggatattttgaccacttagaggccttcgttggaaactggttttttgcatgtaaggctagacagaataattcccagtaacttccttgtgttgtgtgcattcaactcacagagttgaacgttcccttagacagagcagatttgaaacactctatttgtgcaatttgcaagtgtagatttcaagcgctttaaggtcaatggcagaaaaggaaatatcttcgtttcaaaagtagacagaatgattctgagaaactcctttgtgatgtgtgcgttcaacacacagagtttaacctttcttttcatagagcagttaggaaacactctgtttgtaaagtctgcaagtggatattcagacctccttgaggccttcgttggaaacgggatttcttcatattctgctagacagaagaattctcagtaacttccttgtgttttgtgtattcaactcacagagttgaatgatcctttacacagaacagacttgaaacactcttgttgtggaattttcaagtggagatttcagccgctttgaggtcaacggtagaataggaaatatcttcctatagaaactagacagaatgattctcagaaactcctttgtgatgtgtgcgttcaactcacagagtttaacttttcttttcatagagcagttaggaaacactctgtttgtaaagtctgcaagtggatattcagacctctttgtggccttcgttggaaacgggatttcttcatattatgctagacagaataattctcagtaacttccttgtgttgtgtgtattcaactctcagagttgaacgatcctttacagagagcagacttgaaacactctttttctggaatttgcaagtggagatttcagccgctttgaggtcaatggtagaataggaaatatcttcctatagaaactagacagaatcattctcagaaactgctctgcgatgtgtgcgttcatctctcagagtttaacttttcttttcattcagcagtttggaaacactctgtttgtaaagtctgcacgtggatattttgaccacttagaggccttcgttggaaacgggtttttttcctgtaaggctagacagaagaattcccagtaacttcccttgtgttgtgtacattcaactcacagagttgaacgttcccttagacagagcagagttgaaacactctttttgtgcaattggcaagtggagatttcaagcgctttaaggtcaatggcagaaaaggaaatatcttcgtttcaaaactagagagaatcattcccacaaactgtgttgtgatgtgttcgttcaactcacagagtttaacctttcttttcatagagcagttaggaaacagtctgtttgtaaattctgtaagtggatattctgacatcttgtggccttcgttggaaacgggatttcttcatattctgctagacagaagaattctcagtaactgccttgtgttgtgtgtattcaactcacagagttgaacgatcctttacacagagcagacttgaaacactccttttgtggaatttgcaagtggagatttcagccgctttgaggtcaatggtagaataggaaatatcttcctatagaaactagacagaatgattctcagaaacttctttgtgcgttcaactcacagagtttaacctttcttttcatagagcagttaggaaacactctgtttgtaaagtctgcaagtggatattcagacctgtttgaggccttcgttggaaacgggatttcttcatactatgctagacagaagaattcccagtaacttccttgtgttgtgtgtgttcaactcacagagttgaactttcatttaaacagagcagatttgaaacactctttttgtggaatttgcaagtggagatttcaagcgctttgaggccaaaggcagaaaaggaaatatcttcgtaaaaaaatagacagaatcattctcagaaactgctctgcgatgtgtgcgttcaactctcagagtttaacttttcttttcattcagcagtttgaaaaccctctgtttgtaaagtctgcacgttgataatttgaccacatagaggccttcgttggaaacgggtttttctcatgtaaggctagacagaagaattcccagtaacttccttgtgttgtgtgcattcaactcacagagttgaacgttccctttgacagagcagatttgaaacactgtatttgtgcaatttgcaagtgtagatttcaagcgctttaaggtcaatggcagaaaaggaaatttcttcgtttcaaaactagacagaatcattcccacaaactgcgttgtgatgtgttcgttcaactcacagagtttaacctttctgttcatagagcagttaggaaacactctgtttgtaaagtctgtaagtggatattctgacatcttgtggccttcgttggaaacgggatttcttcgtattctgctagacagaagaattctcagtaacttccttgtgttgtgtgtattcaactcacagagttgaacgatcctttacacagagcagacttgaaacactctttttgtggaatttgcaagtgtagatttcagccgctttgaggtcaatggtagaataggaaatatcttcctatagaaactagacagaatgattctcataaactcctttgtgatgtgtgcgttcaaatcacagagtttaacttttcttttcatagagcagttaggaaacactctgtttgtaaagtctgcaagtggatattcagacctctttgaggccttcgttggaaacgggatttcttcatattatgctagacagaagaattcccagtaacttccttgtgttgtgtgtgttcaactcacagagttgaactttcatttacacagagcagatttcaaacactctttttgtggaatttgcaagtggagatttcaagcgctttgaggccaaaggcagaaaaggaaatatcttcgtataaaaactagacagaatcattctcagaaactgctctgcgatgtgtgcattcaactctcagagtttaacttttcttttcattcagcagtttggaaacactctgtttgtaaagtctgcacgtggatattttgaccacttagaggccttcgttggaaacgggtttttttcctgtaaggctagacagaagaattcccagtaacttccttgtgttgtgtatattcaactcacagagttgaacgttcccttagacagagcagatttgaaacactctttttgtgcaattggcaagtggacatttcaagcgctttgaggtcaatggcagaaaaggaaatatcttcgtttcaaaactagacagaatcattcccacaaactgcgttgtgatgtgttcgttcaactcacagagtttaacctttctgttcatagagcagttaggaaacactctgtttgtaaagtctgtaagtggatattctgacatcttgtggcctacgttggaaacgggatttctccatattctgctagacagaagaattctcagtaacttccttgtgttgtgtgtattcaactcacagaagttgagcgatcctttacacagagcagacttgaaacactctttttgtggaatttgcaagtggagatttcagccgctttgaggtcaatggtagaataggaaatatcttcgtatagaaactagacagaatgattctcagaaaatcctttgtgatgtgtgcgttcaactcacagagtttaacttttcttttcatatagcagttaggaaacactttgtttgtaaagtctgcaagtggatattcagacctctttgaggcattcgttggaaacgggatttctccatattatgctagagtgaagaattctcagtaacttccttgtgttgtgtgtattcaactgacagagttgaactttcatttagagagagcagatttgaaacactgtttttgtggaatttgcaattggagatttcaagcgctttggggccaaaggcagaaaaggaaatatcttcgtataaaaactagacggaatcattctcagaaactgctctgcgatgtgtgcgttcaactctcagagtttaacttttcttttcattcagcagtttggaaacactctgtttgtaaagtctgcacgtggatattttgaccacttagaggccttcgttggaaacgggtttttttcccgtaaggctagacagaagaattctcagtaacttccttgtgttgtgtgtattcaactcacagagttgaacgttcccttagacagagcagatttgaaacactctatttgtgcaatttgcaagtgtagttttcaagctctttaaggtcaacggcagaaaaggaaatatcttcgtttcaaaactagacagaatcattcccacaaactgcgttgtgatgtgttcgttcaactcacagagtttaacctttctgttcatagagcagttaggaaacactctgtttgaaaagtctgcacgtggatattcagacctctttgaggccttcgttggaaacgggatttcttcctattctgctagacagaagaattctcagtaacttcccttgtgttgtgtgtattcaactcacagagttgaacgatcctttacacagagcagacttgaaacactccttttgtggaatttgcaagtggagatttcagccgctttgaggtcaatggtagaataggaaatatcttcctatagaaactagacagaatgattctcagaaactcctttgtgatgtgtgcgttcaactcacagagttcaacctttcttttcatagagcagttaggaaacactctgtttgtaaagtctgcaagtggatattcagacttctttgaggctttcgttggaaacgggatttcttcatattctgctagacagaagaattctcagtaacttccttgtgttgtgtgtattcaactgacagagttgaactttcatttagagagagcagatttgaaacactgttcttgtggaatttgcaagtggagatttcaagcgctttggggccaaaggcagaaaaggaaatatcttcgtataaaaactagacagaatcattctccgaaactgctctgcgatgtgtgcgttcaactctcagagtttaacttttcttttcattcagcagtttggaaacactctgtttgtaaagtctgcacgtggataacttgaccacttagaggccttcgttggaaacgggtttttttcctgtaaggctagacagaagaattcccagtaacttccttgtgttgtgtacattcaactcacagagttgaacgttcccttagacagagcagatttgaaacactctttttgtgcaattggcaaatggagatttcaagcgctttaagttcaatggcagaaaaggaaatatcttcgtttcaaaactagacagaatgattctcagaaactccgttgtgatgtgtgcgttcaactcacagagtttaacctttcttttcatagagcagttaggaaacactctgtttgtaaagtctgcaagtggatattcagacctctttgaggccttcgttggaaacgggatttcttcatattctgctacagagaagaattctcagtaacttccttgtgttgtgtgtattcaactcacagagttcaacgatcctttacacagagcagacttgaaacactgtttttgtggaatttgcaagtggagatttcagccgctttgaggtcaatggtagaaaaggaaatatcttcctataaaaactagaccgaatgattctcagaaactcctttgtgatgtgtgtgtgttcaactcacagagtttaacatttcttttcatagagcagttaggaaacactctgtttctaaagtctgcaagtggatattcagacctctttgaggccttcgttggaaacgggtttttttcatataaggctagacagaagaattcccagtaactttccttgtgttgtgtgtgttcaactcacagagttgaactttcatttacacagagcagatttgaaacactctttttgtggaatttgcaaatggagatttcaagcgctttgaggccaaaggcagaaaaggaagtatcttcgtataaaaactagacagaatcattctcagaaactgctctgcgatgtgtgcgttcaactctcagagtttaacttttcttttcattcagcagtttggaaacactctgtttgtaaagtctgcacgtggataacttgaccacttagaggccttcgttggaaacgggtttttttcatgtaaggctagacagaagtattctcagtaacttccttgtgttgtgtgtattcaactcacagagttgaacgatcctttacacagagcagacttgtaacactctttttgtggaatttgcaagtggagatttcagccgctttgaagtcaaaggtagaaaaggaaataacttcctataaaaactagacagagtgattctcagaaactcctttgtgatgtctgcgttcaactcacagagtttaacctttcttttcatagagcagttaggacacactctgtttgtaaagtctgcaagtggatattcagacatctttgaggccttcgttggaaacgggatttcttcatgttctgctagacagaattctcagtaacttccttgtgttgtgtgtattcaactcacagagttgaacgatcctttacacagagcatacttggaacactctttttgtggaatttgcaagtggagatttcagccgctttgaagtcaaaggtagaaaaggaaatatcttcctataaaaactagacagaatgattctcagaaactcctttgtgatgtgtgcattcaactcacagagtttaacctttcttttcatagagcagttaggaaacactctgtttgtaaagtctgcaagtggatattcagacctctttgaggccttcgttggaaacgggtttttttcatataaggctagacagaagaattctcagtaacttccttctgttgtgtgtattcaactgacagagttgaactttcatttagagagagcagatttgaaacactgtttttgtggaatttgcaagtggagatttcaagcgctttggggccaaaggcagaaaaggaaatatcttcgtataaaaactagacagaatcattctcagaaactgctgcgtgatgtgtgcgtccaactctcagagtttaacttttcttttcattcagcggtttggaaacactctgtttgtaaagtctgcacgtggatattttgaccacttagaggtcttcattggaaacgggtttttttcatgtaaggctagacagaagaattcccagtaacttccttgtgttgtgtacattcaactcacagagttgaacgttcccttagacagagcagatttgaaacactctttttgtgcaattggcaagtggtgatttcagcctctttgaggtcaatggtagaaaaggaaatatcttcgtataaaaactagacagaatcattcccacaaactacgttgtgatgtgttcgttcaactcacagagtttaacctttctgttcatagagcagttaggaaacactctgtttgtaaagtctgtaagtggatattctgacatcttgtggccttcgttggaaacgggatttcttcatattctgctagacagaagaattctcagaatcttccttgtgttgtgtgtattcaactcacagagttgaacgatcctttacacagagcagacttgaaacactctttttgtggaatttgcaagtggagatttcagccgctttgaggtccatgggagaaaaggaaatatcttcgtataaaaactagacagaatgattctcagaaactcctttgtgatgtgtgcgttcaactcacagagtttaacctttcttttcatagagcagttaggaaacactctgtttgtaaagtctgcaagtggatattcagacctctttgaggccttcgttggaaacgggtttttttcatactatgctagacagaagaattcccagtaacttccttgtgttgtgtgtgttcaactcacagagttgaactttcatttacacagagcagatttgaaacactctttttttggaatttgcaagtggagatttcaagcgatttgaggccaaaggcagaaaaggaaatatcttcgtttcaaaactagacagaatcattctcagaactgctctgcgatgtgtgcgttcaactctcagagtttaacttttcttttcattcagcagtttggaaacactctgtttgtaaagtctgcacgtggatattttgaccatttagaggctttcgttggaaacgggtttttttcttgtaaggctagacagaagaattcccagtaacttccttgtgttgtgtgcattcaactcacagagttgaacgttcccttagacagagcagatttgaaacactctatttgtgcaatttgcaagtgtagatttcaagcgctttaaggtcaacggcagaaaaggaaatatcttcgtttcaaaactagacagaatcattcccacaaactgcgttgtgatggttcgttcaactcacagagtttaacctttcttttcatagagcagttaggaaacagtctgtttgtcaattctgtaagtggatattctgacatcttgtggccttcgttggaaacgggatttcttcatattctcctagacagaagagttctcagaaacttccttgtgttgtgtgtattcaactcacagagttgaacgatcctttacgcagagcagacttgaaacactctttttgtggaatttgcaagtggagatttcagccgctttgaggtcaatggtagaataggaaatatcttcctatagaaactagacagaatgattctcagaaactcctttgtgatgtgtgcgttcaactcacagagtataacctttcttttcatagagcagttaggaaacactctgtttgtaaagtgtgcaagtggatattcagacctctttgaggccttcgttggaaacggcatttcttcataatatgctagacagaagaattctcagtaacttccttgtgttgtgtgtattcaactcacagagttgaacgatcctttacacagagcagacttgaaacactctttttgtggaatttgcaagtgtagatttcagccgctttgagttcaatggtagaataggaaatatcttcctatagaaactagagagaatcattctccgaagctgctgcgtgatgtgtgcgttcaactctcagagtttaacttttcttttcattcagcggtttggaaacactctgtttgtgaagtctgcacgtggatattttgaccacttagaggccttcgttggaaacgggtttttttcatgtaaggctagacagaagatttcccagtaacttccttgtgttgtgtgcattcaactcacagagttgaacgttcccttagacagagcagatttgaaacactctatttgtgcaatttgcaagtgtagatttcaagcgctttaaggtcaatggcagaaaaggaaatatcttcgtcttcaaaactagacagaatgattctgtgaaactcctttgtgatgtgtgcgttcaactcacacagtttaacctttcttttcatagagcagttaggaaacactctgtttgtaaagtctgcaagtggatattcagacctccttgaggccttcgttggaaacgggatttcttcatattatgctagaaagaagaattcccagtaacttccttgtgttgtgtgtatacaactcacagagttgaacgatcctttacacagagcagacttgaaacactctttttgtggaatttgcaagtggagatttcagccgctttgagttcaatggtagaataggaaatatcttcctatagaaactagacagaaatgattctcaggaaactcctttgtgatgtgtgcgttcaactcacagagtttaacctttcttttcatagagcagttaggaaacactctgtttgtaaagtctgcaagtggatattcagacctctttgaggccttcgttggaaacgggtttttttcatataaggctagacagaagaattccctgtaacttccttgtgttgtgtgtgttcaactcacagagttgaactttcatttacacagagcagatttgaaactctccttttgtggaatttgcaagtggagatttcaagcgctttgaggccaaaggcagaaaaggaaatatcttcgtttcaaaactagacagaatcattctcagaaactgctctgcgatgtgtgcgttcaactctcagagtttaacttttcttttcattcagcagtttggaaacactctgtttgtaaagtctgcacgtggatattttgaccatttagaggccttcgttggaaacgggtttttttcttgtaaggctagacagaagaattcccagtaacttccatgtgttgtgtgcattcaactcacagagttgaacgttcccttgaacagagcagatttgaaactctctatttgtgcaatttgcaagtgtagatttcaagcgctttaaggtcaatggcagaaaaggaaatatcttcgtttcaaaactagacagaatgattctgagaaactcctttgtgatgtgtgcgttcaactcacagagtttaacctttcttttcatagagcagttaggaaacactctgtttgtaaagtctgcaagtggatattcagacatctttgaggctttctttggaaacgggatttcttcatattctgctagacagaagaattctcagaaacttcgttgtgttgtgtgttttcaactcacagagttcaacgatcctttacacagagtagacttgaaacactctttttgtggaattggcagggtggagatttcagccgctttgaggtcaatggtagaaaagtaaatatcttcgtataaaaactagacagaatgattgtcagaaactcctttgtgatgtgtgtgttcaactcacagagtttaacctttcttttcatagagcagttagtaaacactctgtttataaagtctgcaagtggatattcagacccctttgaggccttcgttggaaacgggatttcttcatattatgctagacagaagaattcccagtaacttccttgtgttgtgtgtgttcaactcacagagttgaactttcatttacccagagcagatttgaaacactgtttttgtggaatttgcaagtggagatttcaagcgctttgaggccaaaggcagaaaaggaaatatcttcgtttcaaaactagacagaatcattctttgaaactgctgcgtgatgtgtgcgttcaactctcagagtttaacttttcttttcattcagcggtttggaaacactctgtttgtaaagtctgcacgtggaaattttgaccacttagaggccttcgttggaaacgggtttttttcatgtaaggctagacagaagaattcccagtaacttccttgtgttgtgtgcattcaactcacagagttgaacgttcccttagacagagcagatttgaaacactctatttgtgcaatttgcaagtgtagttttcaagctctttaaggtcaacggcagaaaaggaaatatcttcgtttcaaaactagacagaatcattcccacaaactgcgttgtgatgtgttcgttcaactcacagagtttaacctttctgttcatagagcagttaggaaacactctgtttgtaaagtctgcaagtggatattcagacctctttgaggccttcgttggaaacgggatttcttcatattatgctacacagaagaattctcagtaacttccttgtgttgtttgtattcaactcacagagttgaacgatcctttacacagagcagacttgaaacactctttttgtggaatttgcaagtggagatttcagccgctttgaggtcaatggtagaaaaggaaactatcttcatataaagactagacagaatgattctgagaaatcctttgtgatgtgtgcgtacaactcacagagtttaacctttcttttcatagagcagttaggaaacactctgtttgtaaagtctgcaagtggatattcagacctccttgaggccttcgttggaaacgggatttcttcatattatgctagacagaagaattcccagtaacttccttgtgttgtgtgtgttcaactcacagagttgaactttcatttacacagagcagatttgaaacactctttttgtggaatttgcaaatggagatttcaagcgctttgaggccaaaggcagaaaaggaaatatcttcatataaaaactagacagaatcattctcagaaactgctctgtgatgtgtacgttcaactctcagagtttaacttttcttttcattcagcagtttggaaacactctgttcgtaaagtctgcacgtggataatttgaccacttagaggccttcgttggaaacgggtttttttcatgtaaggctagacagaagaattcccagtaacttccttgtgttgtgtgctttcaactcacagagttgaacgttcccttagacagagcagatttgaaacactctatttgtgcaatttgcaagtgtagatttcaagcgctttaaggtcaatggcagaaaaggaaatatcttcgtttcaaaactagacagaatcattcccacaaactgcgttgtgatgtgttcgttcaactcacagagttttacctttctgttcatagagcagttaggaaacactctgtttgtaaagtctgcaagtggatattcagacctccttgaggccttcgttggaaacgggatttcttcatattctgctagacagaagaattctgagtaacttccttgtgttgtgtgtattcaactcacagagttgaacgatcctttacagagagcagactttaaacactctttttgtggaatttgcaagtggagatttcagccgctttgaggtcaatggtagaaaaggaaatatcttcgtataaagactagacagaatgattctcagaaactcctttgtgatgtgtgcgttcaactcacagagtttaacttttcttttcatagagcagttaggaaacactctgtttgtaaagtctgcaagtggatattcagacctctttgaggccttcgttggaaacggcatttcttcatattatgctagacagaagaattctcagtaacttcctcgtgttgtgtgtattcaactgacagagttgaactttcatttagagagagcagatttgaaacactctttttgtggaatttgcaagtggagatttcaagcgctttggggccaaaggcagaaaaggaaatatcttcgtataaaaactagacagaatcattctcagaaactgctgtgtgatgtgtgcgttcaactctcagagtttaacttttcttttcattcagcggtttggaaacactctgtttgtaaagtctgcacgtggatattttgaccacttagaggccttcgttggaaacgggtttttttcatgtaaggctagacagaagaattcccagtaacttccttgtgttgtgtacattcaactcacagagttgaacgttcccttagacagagcagatttgaaacactctttttgtgcaattggcaaatggagatttcaagcgctttaaggtcaatggcaggaaaggaaatatcttcgtttcaaaactagacagaatcattcccacaaactgcgttgtgatgtgttcgttcatctcacagagtttaacctttcttttcatagagcagttaggaaacactctgtttgtaaattctgtaagtggatattctgacatcttgtggccttcgttggaaacgggatttcttcatattctgctagacagaagaattctcagcaacttccttgtgttgtgtgtattcaactcacaaagttgaacgatcctttgagcagacttgaaacactctttttgtggaatttgcaagtggagatttcagccgctttgaggtcaatggtagaaaaggaaatatcttcgaataaaaactagacagaatgattctaagaaactcctttgagatgtgtgcgttcaactcacagagtttaacctttcttttcatagagcagttaggaaacactctgtttgtaaagtctgcaagtggatattcagacctctttgaggccttcgttggaaacgggatttcttcatattctgctagaaagaagaattctcattaacttcattgtgttgtgtgtattcaactcacagagttcaacgatcctttacacagagcagacttgaaacactctttttctggaatttgcaagtggagatttcagccgctttgaggtcaatggtagaaaaagaaatatcttcctataaaaactagacagaatcattctcagaaactgctctgcgaggtgtgcgttcaactctcagagtttaacttttcttttcattcagcagtttggaaacactctgtttgtaaagtctgcacgtggatattttgaccacttagaggccttcgttggaaacgggtttttttcctgtaaggctagacagaagaattcccagtaacttccttgtgttgtgtacattcaactcacagagttgaacgttcccttagacagagcagatttgaaacactctttttgtgcaattggcaagtggagatttcaagcgctttaaggtcaatggcagaaaaggaaatatcttcgtttcaaaactagacagaatcattcccacaaactgcgttgtgatgtgttcgttcaactcacagagtttaacctttctgttcatagagcagttaggaaacactctgtttgtaaagtctgtaagtggatattctgacatcttgtgcccttcgttggaaacgggatttcttcctattctggtagacagaagaattctcagtaacttccttgtgttgtgtgcattcaactcacagagttgaacgatcctgtacacagagcagacttgaaacactctttttgtggaatttgcaagtggagatttcagccgctttgaggtcaatggtagaaaagggaatatcttcgtatagaaactagacagaatgattctcagaaacttcttggtgatgtgtgcgttcaactcacagagtttaacctttcttttcatagagcagttaggaaacactctgtttgtaaactctgcaagtggatattcagacctgtttgaggccttcgttggaaacgggatttcttcatactatgctagacagaaaaattcccagtaacttccttgtgttgtgtgtgttcaactcacagagttgaactttcatttacacagagcagatttgaaacactctttttgtggaatttgcaagtggagatttcaagcgctttgaggccaaaggcagaaaaggaaatatcttcgtttcaaaactagacagaatcattctcagaaactgctctgcgatgtgtgcgttcaactctcagagtttaacttttcttttcattcagcagtttggaaacactctgtttgtaaagtctgcacgtggatattttgaccacttagaggccttcgttgcaaacgggtttttttcctgtaaggctagacagaagaattcccagtaacttccttgtgttgtgtgcattcaactcacagagttgaacgttcccttagacagagcagatttgaaacactctatttgtgcaatttgaaagtgtagatttcaagcgctttaaggtcaacggcagaaaaggaaatatcttcgtttcaaaactagacagaatcattcccacaaactgcgttgtgatgtgttcgtttaactcacggagtttaacctttctgttcatagagcagttaggaaacactctgtttgtaaattctgcaagtggatattcagacctctttgaggccttcgttggaaacgggatttcttcatattatgctagacagaagaattctcagtaacttccttgtgttgtgtgtattcaactcacagagttgaatgatcctttacacagaacagtcttgaaacactctttttgtggaatttgcaagtggagatttcagccgctttgaggtctatggtagaataggaaatatcttcctatagaaactagacagaatgattctcagaaactcctttgtgatgtgtgcgttcaactcacagagtttaacctttcttttcatagagcagttaggaaacactctgtttgtaaagtctacaagtggatattcagacatctttgaggctttcgttggaaacgggatttcttcatattctgctagacagaagaattctcagtaacttcttgtgttgtgtgtattcaactgacagagttgaactttcatttagacagatcagatttgaaacactgttttcgtggaatttgcaagtggaggtttcaagcgctttgaagccaaaggcagaaaaggaaatatcttcctataaaaaccagacagaaacattctcaaaaactgctctgtgatgtgtgcgttcaactctcagagtttaattttcttttcattcagcagtttgtaaacactctgtttgtaaagtctgcacgtggatattttgaccacttagaggccttcgttggaaacgagtttttttcatgtaaggctagacagaagaattcccagtaacttccttgtgttgtgttcattcaactcacagagttgaacgttcccttagacagagtagatttgaaacactctttttgtgcaattggcaagtggagatttcaagcgctttaaggtcaatggcagaaaaggaaatatcttcgtttcaaaactagacagaatgattctcagaaacttcattgtgacgtgtgcgttcaactcacagagtttaacctttcttttcatagagcagttaggaaacagtctgtttgtcaattctgtaagtggatattctgacatcttctggccttcgttggaaacgggatttcttcatattctgctagacagaagaattctcagaaacttccttgtgttgtgtgttttcaactcacagagttgaacgatcctttacacagagcagacttgaaacactccttttgtggaatttgcaagtggagatttcagccgctttgaggtcaatggtagaataggaaatatcttcctataaaaactagacagaatgattctcagaaacttcattgtgatgtgtgcgttcaactcacagactttaacctttcttttcatagagcagttaggaaacactctgtttgtaaagtctgcaagtggatattcagacctctttgaggccttcgttggaaactggtttttttcatgtaaggctagacagaagaattcccagtaacttccttgtgttgtgtgtgttcaactcacagagttgaactttcatttacacagagcagatttgaaacactctttttgtggaatttgcaaatggagatttcaagcgctttgaggccaaaggcagaaaaggaaacatcttcgtataaaaactacacagaatcattctcagaaactgctctgcgatgtgtgcgttcaactctcagagtttaactttgcttttcattcagcagtttggaaacactctgtttgtaaagtctgcacgtggataatttgaccacttagaggccttcgttggaaacgggtttttttcatgtaaggctagacagaagaattcccagtaacttcattgtgttgtgtgcattcaactcacagagttgaacgttcccttagacagagcagatttgaaacactctatttgtgcaatttgcaagtgtagatttcaagcgctttatggtcaacggcagaaaaggaaatatcttcgtttcaaaactagacagaatcattcccacaaactgcgtagtgatgtgttcgttcaactcacagagtttaacctttctgttcatagagcagttaggaaacactctgtttgtaaagtctgtaagtggatattctgacatcttgtggccttcgttggaaacgggatttcttcatattctgctagacagaagaattctcagaaacttccttgtgttgtgtgtattcaactcacagagttgaacgatcctttacagagagcagacttgaaacactctttttgtggaatttgcaagtggagatttcagccgctttgaggtcaaaggtagaataggaaatatcttcctacagaaactagacagaatgattctcagaaactcctttgtgatgtgtgcgttcaactcacagagtttaccctttcttttcatagagcagttaggaaacactctgtttgtaaagtctgcaagtggatattcagacgtccttgaggctttcgttggaaacgggatttcttcatattctgctagaaagaagaattcccagtaacttccttgtgatgtgtgtgttcaactcacagagttgaactttcatttacacagagcagatttgaaacactctttttgtggaatttgcaagtggagatttcaagcgctttgaggccaaaggcagaaaaggaaatatcttcgtataaaaactacacagaaatcattctcagtaaactgctgcgtgatgtgtgcgttcaactctcagagtttaacttttcttttcattcagcagtttggaaacactctgtttgtaaagtctgcacgtggaaattttgaccacttagaggccttcgttggaaacgggtttttttcatgtaaggctagacagaagaattcccagtaacttccttgtgttgtgtacattcaactcacagagttgaacgttcccttagacagagcagatttgaaacactctttttgtgcaattggcaagtggtgatttcagccgctttgaggtcaatggtataaaaggaaatatcttcgtattaaaactagacagaatcattctcagaaactgctctgcgatgtgtgcgttcaactctcacagtttaacttttcttttcattcagcagtttggaaacactctgtttgtaaagtctgcacgtggataatttgaccacttagaggccttcgttggaaacgggtttttttcatgtaaggctggacagaagaattctcagtaacttccttttgttgtgtgtattcaactcacagagttgaacgatcctttacacagagcagacttgtaacactctttttgtggaatttgcaagtggagatttcagccgctttgaagtcaaaggtagaaaaggaaatatcttcctataaaaactagacagaatgattctcagaaacttctttgtgatgtgtacgttcaactcacagagtttaacctttcttttcatagagcagttaggaaacactctgtttgtaaactctgcaagtggatattcagacctctttgaggccttcgttggaaacgggatttcttcatactatgctagacagaagaattctcagtaacttccttgtgttgtgtgtattcaactcacagagttgaacgatcctttacacagagcagtcttgaaacactctttttgtggaatttgcaagtggagatttcagccgctttgaggtcaatagtagaaaaggaaatatcgtcgtagaaaaactagacagaaatcattctcagaaactgctctgcgatgtgtgcgttcaactctcagcgtttaacttttcttttcattcagaagtttggaaacactctgtttgtaaagtctgcacgtggataacttgaccacttagaggccttcgttggaaacgggtttttttcatgtaaggctagacagaagaattcccaggaacttccttgtgttgtgtacattcaactcacagagttcaacgttcccttagacagagcagatttgaaacactctttttgtgcaattggcaagtggtgatttcagcctctttgaggtcaatggtagaaaaggaaatatcttcgtataaaaactagacagaatgattctcagaaacttctttgtgaagtgtgcgttcaactcacagtgtttaacctttcttttcatagagcagttaggaaacactctgtttgtaaactctgcaagtggatattcagacctctttgaggccttcgttggaaacgggatttcttcatactgtgctagacagaagaattctcagtagcttcattgtgttgtgtgtattcaactcacagatttcaacgatcctttacacagagcagacttgaaaccctctttttctggaatttgcaagtgtagatttcagccgctttgaggtcaatggtagaataggaaatatcttcctatagaaactagacagaatgattctcagaaactcctttgagatgtgtgtgttcaactcacagagtttaacctttcttttcatagagcagttaggaatcactctgtttgtaaagtctgcaagtggatattcagacctctttgaggccttcgttggaaacgggttttttcatataaggctagacagaagaattctcagtaacttccttgtgttgtgtgtattcaactcacagagttgaacgatcctttacacagagcagatttgtaacactctttttgtggaatttgcaagtggagatttcaagcgctttgaggccaaaggcagaaaaggaaatatcttcgtttcaaaactagacagaatcattctcagaaactgctctgtgatgtgtgcgttcaactctcagagtttaacttttcttttcattcagcagtttggaaacactctgtttgtaaagtctgcacgtggataatttgaccacttagaggcattcgttggaaacgggtttttttcatgtaacgctagacagaagaattcccagtaacttccttgtgttttgtgcattcaactcacagagttgaacgttcccttagacagagcagatttgaaacactctatttgtgcaatttgcaagtgtagatttcaagcgctttaaggtcaatggcagaaaaggaaatatcttcgtttcaaaactagacagaatgattctcagaaactcctttgtgatgtgtgcgttcaactcacagagtttaacctttcttttaatagagcaattaggaaacactctgtttctaaagtctgcaagtggatattcagacctcttagcggccttcgttggaaacgagatttcttcatattttgctagacaaaagaattctcagtaacttccttgtgttgtgtgcattcaactcacagagttgaacgatcctttacacagagcagattggaaacactctttttgtggaattgcaagaggagatttcagctgctttgaggtcaatggtagaaaaggaaatatcttcgtatgaaaactagacagaatgattctcataaactcctttgtgatgtgtgcgttcaactcacagagtttaacctttcttttcatagagcagttaggaaacactctgtttgtaaagtctgcaattggatattcagacccctttgaggcctttgttggaaacgggatttcttcatattatgctagacagaagaattctcagtaacttccttgtgttgtgtgtattcaactgacagagttgaactttcatttagagagagcagatttgtaacactgtttttgtggaatgtgcaagtggagatttcaagcgctttggggccaaaggcagaaaaggaaatatcttcgtataaaaactagacagaatcattctcagaaactgctctgcgatgtgtgcgttcaactctcagagtttaacttttcttttcattcagaagtttggaaacactgtgtttgtaaagtctgcacgtggataacttgaccacttagaggccttcgttggaaacgggtttttttcatgtaaggctagacagaagaattcccagtaacttccttgtgttgtgtgcattcaactcacagagttgaacgttcccttagacagagcagatttgaaacactctatttgtgcaatttgcaagtgtagatttcaagcgctttaaggtcaatgacagaaaaggaaatatcttcgtttcaaaactagacagaatcattcccacaaactgcgttgtgatgtgttcgttcaactcacagagtttaacctttctgttcatagagcagttaggaaacactctgtttgtaatgtctgtaagtggataatctgacatcttgtggccttcgttggaaacgggatttcttcatattctgctagacagaagaattctcagtaacttccttgtgttgtgtgtattcaaatcacagagttgcacgatcctttacacagagcagacttgaaacactctttttgtggaatttgcaagtggagatttcagccgctttgaggtcaatggtagaataggaaatatcttcctatagaaactagacagaatgattctcagaaactcctttgtgatgtgtgtgttcaactcacagagtttaacctttcttttcatagagcagttagtaaacactctgtttatgaagtctgcaagtggatattcagacccctttgaggccttcgttggaaacgggatttacttcatattctgctagacagaagaattcccagtaacttccttgtgttgtgtgtgttcaactcacagagttgaactttcatttacacagagcagatttgaaacactctttttgtggaatttgcaaatggagatttcaagcgctttgattccaaaggcagaaaaggaaatatcttcgtttcaaaactagacagaatcattctcagaaactgctctgcgatgtgtgccttcaactctcagagtttaacttttcttttcattcagcagtttggaaacactctgtttgtaaagtctgcacgtggatattttgaccacttagaggccttcgttggaaatgggtttttttcctgtaaggctagacagaagaattcccagtaacttccttgtgttgtgtacattcaactcacagagttgaacgttcccttagacagagcagatttgaaacactctttttgtgcaattggcaattggagatttcaagcgctttaaggtcaatggcagaaaaggaaatatcttcgtttcaaaactagacagaatcattcccaaaaactgcgttgtgatgtgttcgttcatctcacagagtttaacctttcttttcatagagcagttaggaaacagtctgtttgtaaattctgtaagtggatattctgacatcttgtggccttcgttggaaacgggatttcttcatattctgctagacagaagaattctcagtaactcccttgtgttgtgtgtattcaactcacagagttgaacgatcctttacacagagcagacttgaaacactctttttgtggaatttgcaagtggagatttcagccgctttgaggtcaatagtagaaaaggaaatatcttcgtagaaaaactagacagaatgattctcataaactcctttgtgatgtgtgcgttcaactcacagagtttaacctttcttttcatagagcagttaggaaacactctgtttgtaaagtctgcaagtggatattcagacctccttgaggccttcgttggaaacgggatttcttcatattatgctagacagaagaattctcagtaacttcccttgtgttgtgtgtattcaactgacagagttgaactttcatttagagagagcagatttgaaacactgtttttgtggaatttgcaattggagatttcaagcgctttggggccaaaggcagaaaaggaaatatcttcgtataaaaactagacagaatcattctcagaaactgctgcgtgatgtgtgcgttcaaccctcagagtttaacttttcttttcattcagcggtttggaaacactctgtttgtatagtctgcacgtggatattttgaccacttagaggccttcgttggaaacgggattttttcatgtaaggctagacagaagaattcctagtaacttccttgtgttgtgtacattcaactcacagagttgaacgttcccttagacagagcagatttgaaacactctttttgtgcaattggcaaatggagatttcaagcgctttaaggtcaatggcagaaaaggaaatatcttcgtttcaaaactagacagaatgattctcagaaactcctttgtgatgtgtgcgttcaactcacagagtttaacttttcttttcatagagcagttagcaaacactctgtttgtaaagtctgcaagtggatattcagacctctttgaggccttcgttggaatcgggatttcttcaaattctgctaggcagaagaattctcagtaacttccttgtgttgtgtgtattcaactcacagagttgaacgatcctttacacagagcagacttgatacactcttcttatggaatttgaaagtgtagatttcagccgctttgaggtcaatggtagaataggaaatatcttcctatggaaactagacagaatgattctcagaaactcctttgtgatgtgtgcgttcaactcatagagtttaacctttcttttcatagagcagttaggaaacactctgtttgtaaagtctgcaagtggatattcagacctctttgaggccttcgttggaaacgggtttttttcatataaggctagacagaagaattctcagtaacttccttgtgttttgtgtattcaactgacagagttgaagtttcatttagagagagcagatttgaaacactgtttttgtggaatttgcaagtggagatttcaagcgctttgggaccaaaggcagaaaaggaaatatcttcgtataaaaactagacagaatcattctcagaaactgctctgcgatgtgtgcgttcaactctcagagtttaacttttcttttcattcagcagtttggaaacactctgtttgtaaagtctgcacctggatattttgaccacttagaggccttctttggaaacgggtttttttcatgtaaggctagacagaagaattcccagtaacttccttgtgttgtgtgcattcaactcacagagttgaatgttcctttagacagagcagatttgaaacactctttttgtgcaatttgcaagtggagatttcaagcgctttaaggtcaatggcagaaaatgaaatatcttcgtttcaaaactacacagaatcattcccacaaactgcgttgtgatgtgttcgttcaactcacagagtttaacctttcttttcatagagcagttaggaaacagtctgtttgtaaattctgtaagtggatattctgacatcttgtggccttcgttggaaacgggatttcttcatactgtgctagacagaagaattctcagtaacttctttgtgttgtgtgtattcaactcacagagttgaacgatcctttacacagagcagacttgaaacactctatttgtggaatttgcaagtggagatttcagccgctttgaggtcaatggtagaataggaaatatcttcctatagaaactagacagaatgatcctcagaaactcctttgtgatgtgtgcgttcaactcacagagtttaacctttcttttcatagagcagttaggaaacactctgtttgtaaagtctgcaagtggatattcagacctccttgaggccttcgttggaaacgggatttcttcatattatgctagacagaagaattctcagtaacttccttgtgttgtgtgtattcaactgacagagttgaactttcatttagagagagcagatttgaaacactgtttttgtggaatttgcaagtggagatttcaagcgcttcggggccaaaggcagaaaaggaaatatcttcgtataaaaactagacagaatcattctcagaaactgctctgcgatgtgtgcgttcaactctcagagtttaacttttcttttcattcagcagtttggaaacactctgtttgtaaagtctgcacgtggataatttgaccacttagaggccttctttggaaacgggtttttttcatataaggctagacagaagaattcccagtaacttccttgtgttgtgtgcattcaactcacagagttgaacgttcccttagacagagcagatttgaaacactctatttgtgcaatttgcaagtgtagatttcaagcgctttaaggtcaacggcagaaaaggaaatatcttcgtttcaaaactagacagaatcattcccacaaactgcgttgtgatgtgttcgttcaactcacagagtttaacctttctgttcatagagcagttaggaaacactctgtttgtaaagtctgtaagtggatattctgacatcttgtggccttcgttggaaacgggatttcttcatattcttctagacagaagaattctcagtaacttccttgtgttgtgtgtattcaactcacagagttgaacgatcctttacacagagcagactagtaacactctttttgtggaatttgcaagtggagatttcagccgctttgaagtcaaaggtagaaaaggaaatatcttcctataaaaactagacagaatgattctgagaaactcctttgtgctgtgtgcattcaactcacagagtttaacctttcttttcatagagcagttaggaaacactctgcttgtaaagtctgcaagtggatactcagacctccttgaggccttcgttggaaacgggatttcttcctattatgctagacagaaggattcccagtaacttccttgtgttgtgtgtgttcaactcacagagttgaactttcatttacaaagagcagatttgaaacactctttttgtggaatttgccagtggagatttcaagcgctttgaggccaaaggcagaaaaggaaatatcttcgtataaaaactagacagaatcattctcagaaactgctctgcaatgtgtgcgttcaactctcagagtttaacttttcttttcattcagcagtttgtaaacactctgtttgtaaagtctgcacgtcgatgttttgaccacttagaggccttcgttggaaacgggtttttttcctgtaacgctagacagaagaattcccagtaacttccttgtgttgtgtacattcaactcacagagttgaacgttcccttagacagagcagatttgaaacactctttttgtgcaattggcaagtggtgatttcagccgctttgaggtcaatggtagaaaaggaaatatcttcgtataaaaactagacagaatcattcccacaaactgcgttgtgatgtgttcgttcaactcacagggtttaacctttctgttcatagagcagttaggaaacactctgtttgtaaagtctgtaagtggatattctgacatacttgtggccatcgttggaaacgggatttcttcatattctgctagacagaagaattctcagtaacttccttgtgttgtgtgtattctactcacagagttgaacgatcctttacacacagcagacttgaaacactctttttgtggaaattgcaagtggagatttcagccgctttgaggtcaatggtagaataggaaatatcttcctatagaaactagacagaatgattctcagaaactcctttgtgatgtgtgtgttcaactcacagagtttcacctttcttttcatagagcagttaggaaacactctgtttgtaaagtctgcaagtggatattcagacctccttgaggacttcgttggaaacgggatttcttcatattctgctagacagaagaattctcagtaacttccttgtgttgtgtttattgaactgacagagttgaactttcatttagagagagcagatttgaaacactgtttttgtggaatttgcaagtggagatttcaagcgctttggggccaaaggcagaaaacgaaatatcttcgtataaaaactagacagaatcattctcagaaactgctgcgtgatgtgtgcgttcaactctcagagtttaacttttcttttcattcagcggtttggaaacactctgtttgtaaagtctgcacgtggatattttgaccacttagaggccttcgttggaaacgggtttttttcatgtaaggctagacagaagaattcccagtaacttccttgtgttgtgtacattcaactcacagagttgaacgttcccttagacagagcagatttgaaacactctttttgtgcaattggcaagtggagatttcaagcgctttaaggtcaatggcagaaagggaaatatcttcgtttcaaaactagacagaatcattcccacaaactgcgttgtgatgtgttcgttcaactcacagagtttaacctttcttttcatagagcagttaggaaacactctgttggtaaattctgtaggtggatattctgacatcttgtggccttcgttggaaacgggatttcttcatattctgctagacagaagaattctcagaatcttccttgtgttgtgtgtattcaactcacagagttgaacgatcctttacacagagcagacttgaaacactctttttgtggaatttgcaagtggacatttcagccgctttgaggtccatggtagaaaaggaaatatcttcgtacaaaaactagacagaatgattctcagaatcttctttgtgatgtgtgcgttcaactcacagagtttaacctttcttttcatagagcagttaggaaacactctgtttgtaaattctgcaagtggatattcagacctcattgaggccttcgttgaaaacgggatttcttcatactatgctagacagaagaattcccagtaacttccttgtgttgtgtgtgttcaactcacagagttgaactttcatttacacagagcagatttgaaacactctttttgtggaatttgcaaatggagatttcaagcgctttgagaccaaaggcagaaaaggaaatatcttcgtataaaaactagacagaatcattctcagaaactgctgcgtgatgtgtgcgttcaactctcagagtttaacttttcttttcattcagcagtttggaaacactctgtttgtaaagtctgcacgtggaaattttgaccacttagaggccttcgttggaaacgggtttttttcatgtaaggctagacagaagaattcccagtaacttccttgtgttgtgtacattcaactcacagagttgaacgttcccttagacagagcagatttgaaacactctttttgtgcaattggaaagtggagattttaagcgctttaaggtcaatggcagaaaaggaaatatctccgtttcaaaactagacagaatcattcccacaaactgcgttgtcatgtgttcgttcaactcacagagtttaacctttcttttcatagagcagttaagaaacagtctgtttgtaaattctgtaagtggatattctgacatcttgtggccttcgttggaaacgggatttcttcatattctgctagacagaataattctcagtaacttccttgtgttgtgtgtattcaactcacagagttgaacgatcctttacagagagcagacttgaaaaactctttttgtggaatttgcaagtggagatttcagccgctttgaggtcaatggtagaaaaggaaatatcttcgtataaagaatagacagaatgattctcagaaacttcattgtgatgtgtgcgttcaactcacagagtttaacctttcttttcatagagcagttaggaaacactctgtttgtaaactctgcaagtggatattcacacccctttgaggccttcgttggaaacgggatttcttcatactgtgctagacagtagaattctcagtaacttccttgtgttgtgtgtattcaactcacagagttgaacgatcctttacacagagcggacttgaaacactctttttgtggaatttgcaagtggagatttcagccgctttgaggtcaatggtagaaaaggaaatatcttcgtataaaaactagacagaatcattctcagaaactgctctgcgatgtgtgcgttcaactctcagagtttaacttttcttttcattcagcagtttggaaacactctgtttgtaaagtctgcacgtggatattttgaccacttagaggcctttgttggaaacgggtttttttcctgtaaggctagacagaagaattcccagtaacttccttgcgttgtgtacattcaactcacagagttgaacgttcccttagacagagcagatttgaaacactctttttgtgcaattggcaagtggagatttcaagcgctttaaggtcaatggcagaaaaggaaatatcttcgtttcaaaactagacagaatcattcccacaaactgcgttgtgatgtgttcgttcaactcacagagtttaacctttctgttcatagagcagttaggaaacactgtgtaaagtctgttagtggatattctgacatccttgtggccttcgttggaaacgggatttcttcatattctgctagacagaataattctcagtaactcccttgtgttgtgtgtattcaactcacagagttgaacgatcctttacacagagcagacttgaaacacacttttggtggaatttgcaagtggagatttcagccgctttgaggtcaatggtagaaaaggaaatatcttcgtataaagactagacagaatgattctcagaaactcctttgtgatgtgtgtgttcaactcacagagtttaacctttcttttcatagagcagttaggaaacactctgtttgtaaagtctgcaagtggatattcagacctctttgaagccttcgttggaaacgggtttttttcatataaggttagacagaagaattctcagtaacttccttgtgttgtgtgtattcaactgacagagttgaactttcagttggagagagcagatttgaaacactgtttttgtggaatttgcaagtggagatttcaagcgctttggggccaaaggcagaaaaggaaatatcttcgtataaaaactagacagaatcattctcagaaactgctgcgtgatgtgtgcgttcaactctcagagtttaacttttcttttcattcagcggtttcgaaacactctgtttgtaaagtctgcacgtggatattttgaccacttagaggccttcgttggaaacgggttttttgcatgtaaggctagacagaagaattctcagtaacttccgtgtgttgtgtgtattcaactcaaagagttgaacgatcctttacacagagcagacttgtaacactctttttgtggaatttgcaagtggtgatttcagccgctttgaagtcaaaggtagaaaatgaaatatcttcctataaaaactagacagaatcattcccacaaactgcgttgtgatgtgttcgttcaactcacagagtttaacctttcttttcatagagcacttaggaaacagtctgtttgtaaattctgtaagtggatattctgacatcttgtggccttcgttggaaacgggatttcttcatattctgctagacagaagaattctcagaaacttccttgtgttgtgtgttttcaactcacagagttgaacgatcctttacacagagcagacttgaaacactctttttgtggaatttgcaagtggagacttcagccgcttttaggtcaatggtagaataggaaatatcttcctataaaaactagacagaatgattctcagaaactcctttgtgatgtgtgcgttcaactcacagagtttaacctttcttttcatagagcagttaggaaacactctgtttgtaaagtctgcaagtggatattcagacctctttgaggccttcgttggaaacgggttttttacaagataaggcttgacagaagaattcccagtaacttccttgtgttgtgtgtgttcaactcacagagttgaactttcatttacacagagcagatttgaaacactctttttttggaatttgcaagtggagatttcaagcgctttgaggccaaaggcagaaaaggaaatgtcttcgtttcaaaactagacagaatcattctcagaaactgctctgcgatgtgtgcgttcaactctcagagtttaacttttcttttcattcagcagtttggaaacactctgtttataacgtctgcacgtggataacttgaccacttagaggacttcgttggaaacggttttttttcctgtaaggctagacagaagaattcccagtaacttccttgcgttgtgtacattcaactcacagagttgaacgttcccttagacagagcagatttgaaacactctttttgtgcaattggcaagtggagatttcaagcgctttaaggtcaatggcagaaaaggaaatatcttcgtttcaaaactagacagaatgattctcatgaactcctttgtgatgtgtgcgttcaactcacagagtttaacctttcttttcatagagcagttaggaaacactctgtttgtaaagtctgcaagtggatattcagacctccttttggccttcgttggaaacgggatttcttcatattctgctagacagaagaattctcagtaacttccttgtgttgtgtttattcaactcacagagttgaatgatcctttacacagagcagacttgaaacacactttttgtggaaattgcaagtggagatttcagccgctttgaggtcaatggtagaaaagtaaatatcttcgtataaagactagacagaatgattctcagaaactcctttgttatgtgtgcgttcaactcacagagtttaacctttcttttcatagagcagttaggaaacactctgtttgtaaagtctgcaagtggatattcagacctctttgaggccttcgttggaaacgggtttttttcatataagtctagacagaagaattcccagtaacttccttgtgttgtgtgtgttcaactcacacagttgaactttcatttacacagagcagatttgaaacactctttttgtggaatttgaaaatggagatttcaagcgctttgaggccaaaggcagaaaaggaaatatgttcgtataaaaactagacagaatcattctcagaaactgctctgcgatgtgtgcgttcaactctcagagtttaacttttcttttcattcagcagtttggaaacactctgtttgtaacgtctgcacgtgaataatttgaccacttagaggccttcgttggaaacgggtttttttcatgtaaggctagacagaagaattcccagtaacttccttgtgttgtgtgcattcaactcacagagttgaacgttcccttagacagagcagatttgaaacactctatttgtgcaatttgcaagtgtagatttcaagcgctttaaggtcaatggcagaaaaggaaatatcttcgtttcaaaactagacagaatgattctcataaactcctttgtgatgtgtgcattcaactcacagagtttcacctttcttttcatagagcagttagaaaaaactctgtttgtaaagtctgcaagtggatattcagacctccttgaggccttcgttggaaacgggatttcttcatattatgctagacagaacaattctcagtaacttccttgtgttgcgtgtattcaactcacagagttgaacgatcctttacacagagcagacttgaaacactctttttgtggaatttgcaagtggagatttcatccgctttgaggtcaatggtggaaaaggaaatatcttcgtataaagactagacagaatgattctcagaaactcctttgtgatgtgtgtgttcaactcacagagtttaacctttcttttcatagagcagttcgtaaacactctgtttataaagtctgcaagtggatattcagacccctttgaggccttctttggaaacgggatttcttcatattatgctagacagaagaattcccagtaacttccttgtgttgtgtgtgttcaactcacacagttgaactttcatttacactgagcagatttgaaacactctttttgtggaatttgcaaatggagatttcaagcgctttgaggccaaaggcagaaaaggaaatatcttcgtataaaaactagacagaatcattctcagaaactgctctgcgatgtgtgcgttcaactctcagagtttaacttttcttctcattcagcagtttggaaacactctgtttgtaaagtctgcacgtggataatttgaccacttagaggccttcgttggaaacgggtttttttcatgtaaggctagacagaagaattcccagtaacttccttgtgttgtgtgcattcaactcacagagttgaacgttcccttagacagagcagatttgaaacactctatttgtgcaatttgcaagtgtagatttcaagcgctttaaggtcaacggcagaaaaggaaatatcttcgtttcaaaactaaacagaatcattcccacaaactgcgttgtgatgtgttcgttcaactcacagagtttaacctttctgttcatagcgcagttaggaaacactctgtttgtaaagtctgtaagtggatattctgacattttgtggccttcgttggaaatgggatttcttcatattctcctagacagaagaattctcagtaacttccttgtgttgtgtgtattcaactcacagatttgaacgatcctttacacagagcagacttgaaacgctctttttgtggaatttgcaagtggagatttcacccgcgttgaagtcaatggtagaaaaggaaatatcttcgtataaaaactagacagaatgattctcagaaactcctttgtgatgtgtgcgttcaactcacagagtttaacctttcttttcatagagcagttgggaaacactctgtttgtaaagtttgcaagtggatattcagacatccttgaggctttcgttggaaacgggatttcttcatattctgctagaaggaagaattcccagtaacttcccttgtgttgtgtgtgttcaactcacagagttgaactttcatttacacagagcagatttgaaactctctttttgtggaatttgcaaatggagatttcaagcgctttgaggtcaaaggcagaaaaggaaatatcttcgtataaaaactagacagaatcattctcagaaactgctctgcgatgtgtgcgttcaactctcagagtttaacttttcttttcattcagcagtttggaaacactctgtttgtaaagtctgcacgtggatattttgaccacttagaggccttcattggaaacgggtttttttcctgtaaggctagacagaagaattcccagtaacttccttgtgttgtgtgcattcaactcacagagttgaacgttcccttagacagagcagatttgaaacactctatttgtgcaatttgcaagtgtagatttcaagcgctttaaggtcaagggcagaaaaggaaatatcttcgtttcaaaactagacagaatcattcccacaaactgcgttgtgatgggttcgttcaactcacagagtttaacctttctgttcatagagcagttaggaaacactctgtttgtaaagtctgtaagtggatattctgacatcttgtggccttcgttggaaacgggattacttcatattctgctagacagaagaattctcagtaacttccttgtgttgtgtttattcaactcacagagttgaatgatcctttacacagagcagacttgaaacactctttttgtggaatttgtaagtggagatttcagccgctttgaggtcaatagtagaaaaggaaatatcttcgtagaaaaactacacagaatgattctcagaaactcctttgtgatgtgtgttttcaactcacagagtttaaccttccttttcatagagcagttagtaaacactctgtttataaagtctgcaagtggatattcagacccctttgaggccttcgttggaaacgggatttattcatattctgctacacagaagaattctcagtaacttccttgtgttgtgtgtattcaactgacagagttgaactttcatttagagacagcagatttgaaacactgtttttgtggaatttgcaagtggagatttcaagcgcttttgggccaaaggcagaaaaggaaatatcttcgtataaaaactagacagaatcattctcagaaactgctctgcgatgtgtgcgttcaactctcacagtttaacttttcttttcattcagcagtttggaaacactctgtttgtaaagtctgcacgtggataatttgaccacttagaggccttcattggaaacgggtttttttcatgtaaggctagacagaagaattcccagtaacttccttgtgttgtgtgcattcaactcacagagttgaacgttcccttagacagagcagatttgaaacactctatttgtccaatttgcaagtgtagatttcaagcgctttaaggtcaacggcagaaaaggaaatatcttcgtttcaaaactagacagaatcattcccacaaactgcgttgtgatgtgttcgttcaactcacagagtttaacctttcttttcatagagcagttaggaaacactctgtttgtaaagtctctaagtggatattctgacatcttgtggccttcgttggaaacgggatttcttcatattatgctatacagaagaattctcagtaacttccttgcgttgtgtgtattcaactcacagagttgaacgatcctttacacagagcagacttgaaacattctttttgtggaatttgcaagtggagatttcagccgctttgaggtcaatggtagaataggaaatatcttcctatagaaactagacagaacgattctcagaaactccattgtgatgtgtgcgttcaactcacagagtttaacctttcttttcatagagcagttaggaaacactctgtttgtaaagtctgcaagtggatattcagacctctttgaggccttcgttggaaacgggatttcttcctattctgctagacagaagaattcccagtaacttccttgtgctgtgtgtgttcaactcacagagttgaactttcatttacacagagcagatttgaaacactctttttgtggaatttgcaaatggagatttcaagcgctttgaggccaaaggcagaaaaggaaatatcttcgtttcaaaactagacagaatgattctcagaaactgctctgcgatgtgtgcgttcacctctcagagtttaacttttcttttcattcagcagtttggaaaccctctgtttgtaaagtctgcacgtgcataatttgaccacttagaggccttcgttggaaacgggtttttttcatgtaaggctagacagaagaattcccagtaacttccttgtgttgtgtacattcaattcacagagttgaacgttcccttagacagagcagatttgaaacactctttttgtgcaattggcaaatggagatttcaagcgctttaaggtcaatggcagaaaaggaaatatcttcgtttcaaaactagacagaatcattcccacaaactgcgttgtgaagtgttcgttcaactcacagagtttaacctttcttttcatagagcagttaggaaacactctgtttgtaaattctgtaagtggatattctgacatcttggggccttcgttggaaacgggatttcttcatattctgctagacagaagaattctcagtaacttccttgtgttgtgtgtattcaactcacagagttgaatgatcctttacacagtagcagacttgaaacactctttttgtggaatttgcaagtggagatttcagccgctttgaagtcaaaggtagaaaaggaaatatcttcctataaaaactagacagaatgattctcagaaactcctttgtgatgtgtgcgttcaactcacagagtttaacctttcttttcatagagcagttaggaaacactctgtttgtaaagtctgcaagtggatattcagacctctttgaggccttcgttggaaacggtatttcttcatattatgctagacagaaggattcccagtaacttccttgtgttgtgtgtgttcaactcacagagttgaactttcatatacaaagagcagatttgaaacactctttttgtggaatttgcaagtggagatttcaagcgctttgaggccaaaggcagaaaaggaaatatcttcgtataaaaactagacagaatcattctcagaaactgctctgcgatgtgtgcgttcaactctcagagtttaacttttcttttcattcagcagtttgtaaactctctgtttgtaaagtctgcacgtggatattttgaccacttagaggccttcgttggaaacgggtttttttcctgtaaggctagacagaagaattcccagtaacttccttgtgttgtgtacattcaactcacagagttgaacgttaacttagacagagcagatttgaaacactctttttgtgaaattggcaagtggagatttcaagagttttaaggtcaatggcagaaaaggaaatatcttcgtttcaaaactagacagaatcattcccacaaactgcgttgtgatgtgttcgttcaactcacagagtttaacctttctgttcatagagcagttaggaaacactctgtttgtaaagtctgtaagtggatattcagacatcttgtggccttcgttggaaacgggatttcttcatattctgctagacagaagaattctcaataacttccttgtgttgtgtttattcaactcacagagttgaatgatcctttacacagagcagacttgaaacacactttttgtggaaattgcaaatggagatttcagccgctttgaggtcaatggtagaaaagtaaatatcttcgtataaagactagacagaatgattctcagaaactcctttgtgatgtgtgcgttcaactcacagagtttaacctttgttttcatagagcagttaggaaacactctgtttgtaaagtctgcaagtggatattcagacctctttgaggccttcgttggaaacgggtttttttcatataaggctagacagaagaattctcagtaacttccttgtgttgtgtgtattcaactgacagagttgaactttcatttagagagagcagatttgaaacactgtttttgtggaatttgcaaatggagatttcaagagctttggggccaaaggcagaaaaggaaatatcttcgtataaacactagacagaatcattctcagaaactgctgcgtgatgtgtgcgttcaactctcagagtttaacttttcttttcattcagcggtttggaaacactctgtttgaaaagtctgcacgtggatattttgaccacttagaggccttcgttggaaacgggtttttttcatgtaaggctagacagaagaattcccagtaacttccttgtgttgtgtgcattcaactcacagagttgaacgttcccttagacagagcaggtttgaaacactctatttgtgcaatttgcaagtgtagatttcaagcgctttaaggtcaatggcagaaaaggaaatatcttcgtttcaaaactagacagaatcattcccacaaactgcgttgtgatgtgttcgttcaactcacagagtttaacctttctgttcatagagcagttaggaaacactctgtttgtaaagtctgtaagtggatattctgacatcttgtggccttcgttggaaacgggatttcttcgtattctgctagacagaagaattctcagtaacttccttgtgttgtgtgtattcaactcacagagttgaacgatcctttacacagagcagacttgaaacactctttttgtggaatttgcaagtggagatttcagccgctttgaggtcaatggtagaaaagtaaatatcttcgtataaagactagacagaatgattctcagatactcctttgtgatgtgtgcattcaactcacagagtttaacctttcttttcatagagcagttaggaaacactctgtttgtaaagtctgcaagtggatattcagacctccttgtggccttcgttggaaacgggatttcttcatattatgctagacagaagaattcccagtaacttccttgtgttgtgtgtgttcaactcacagagttgaactttcatttacacagagaagatttgaaacactctttttgtggaatttgcaagtggagatttcaagcgctttgaggccaaaggcagaaaaggaaatatcttcgtttcaaaactagacagaatcattctcagaaactgctctgcgatgtgtgcgttcaactctcagagtttgacttttcttttcattcagcagtttggaaacactctgtttgtaaagtctgcacgtggatattttgaccacttagaggccttcgttggaaacgggtttttttcctgtaaggctagacagaagaattcccagtaacttccttgtgttgtgtgcattcaactcacagagttgaacgttcccttagacagagcagatttgaaacactctatttgtgcaatttgcaagtgtagatttcaagcgctttaaggtcaacggcagaaaaggaaatatcttcgtttcaaaactagacagaattattctgagaaactcctttgtgatgtgtgcgttcaactcacagagtttaacctttcttttcatagagcagttaggaaacactctgtttgtaaagtctgcaagtggatattcagacctccttgaggccttcgttggaaacgggatttcttaatattatgctagacagaagaattctcagtaacttccttgtgttgtgtgtattcaactcacagagttgaacgatcctttacacagagcagacttgaaacactctttttgtgaaatttgcaagtggagatttcagccgctttgagttcaatggtagaataggaaatatcttcctatagaaactagacagaatgattctcagaaactcctttgtgatgtgtgcgtacaactcacagagtttaacctttcttttcatagtgcagttaggaaacactctgtaaagtctgcaagtggatattcagacctctttgaggccttcgttggaaacgggatttcttcatattatgctagacagaagaattctcagtaaattccttgtgttgtgtgtattcaactgacagagttgaactttcatttggagagagcagatttgaaacactatttttgtggaatttgcaagtggagatttcaagcgctttggggccaaaggcagaaaaggaaatatcttcgtataaaaactagacagaaatcattctcagaaactgctgcgtgatgtgtgcgttcaactctcagagtttaacttttcttttcattcagcggtttggaaacactctgtttgtaaagtctgcacgtggatattttgaccacttagaggccttcgttggaaacgggtttttttcatgtaaggctagacagaagaattcccagtaacttccttgtgttgtgtgcattcaactcacagagttgaacgttcccttagacagagcagatttgaaacactctatttgtgcaatttgcaagtgtagatttcaagcgctttaaagtcaatggaagaaaaggaaatatcttcgtttcaaaactagacagaatcattcccacaaactgcgttgtgatgtgttcgttcaactcacagagtttaacctttctgttcatagagcagttaggaaacactctgtttgtaaagtctgtaagtgaatgttctgacatcttgtggccttcgttggaaacgggatttcttcatattctgctagacagaagaattctcagtaacttccttgtgttgtgtgtattcaactcacagagttgaacgatcctttacacagagcagacttgaaacactctttttgtggaatttgcaagtggagatttcagcctctttgaggtcaatggtagaataggaaatatcttcctatagaaactaggcagaatgattctcagaaacttcattgtgatgtgtgcgttcaactcacagagtttaacctttcttctcatagagcagttaggaaacactctgtttgtaaactgtgcaagtggatattcagacctctttgaggccttcgttggaaacggaatttcttcatactatgctagacagaagaattctcagtaactttcttgtgttgtgtgtattcaactcacagagttgaacgatcctttacacagagcagacttgaaacactctttttgtggaatttgcaagtggagatttcaagcgctttggggctaaaggcagaaaaggaaatatcttcgtataaaaactagacagaatcattctcagaaactgctgcgtgatgtgtgccttcaactctcagagtttaacttttcttttcattcagcggtttggaaacactctgtttgtaaagtctgcacgtggaaattttgaccacttagaggccttcgttggaaacgggtttttttcatgtaaggctagacagaagaattcccagtaacttccttgtgttgtgtgtattcaactcacagagttgaactttcccttagacagagcagatttgaaacactctttttgtgcaatttggaagtggagatttcaagcgctttagggtcaatggcagaaaagaaaatatcttcatctcaaaactagacagaatcattcccacaaactgcgttgtgatgtgttcgttcaactcacagcagtttaaccttgcttttcatagagcagttaggaaacagtctgtttgtaaattctgtaagtggatattctgacatcttgtggccttccttggaaacgggatttcttcatattctgctagacagaagaattctcagtaacttccttgtgttgtgtgcattcaaatcacagagttgaaagatcctttacacagagcagattagaaacactctttttgtggaacttgcaattggatatttcagccgctttgaggtcaatggtagaaaaggaaatatcttcgtataaaaactagacagaatgattctcagaaactcctttgtgatgtgtgcgtacaactcacagagtttaacctttcttttcatagagtagttaggaaacactctgtttgtaaagtctgcaagtggatattcagacctctttgaggccttcgttggaaacgggtttttttcatataaggctacacagaagaattcccagtaacttccttgtgttgtgtgtgttcaactcacagagttgaactttcatttacacagagcagatttgaaacactctttttgtggaatttgcaactggagatttcaagcgatttgaggccaaaggcagaaaaggaaatatcttcgtttcaaaactagacagaatcattctcagaaactgctgtgcgatgtgtgcgttcaactctcagagtttaacttttcttttcattcagcagtttggaaacactctgtttgtaaagtctgcacgtggatattttgaccacttagaggccttcgttggaaacgggtttttttcctgtaaggctagacagaagaattcccagtaacttccttgtgttgtgtacattcaactcacagagttgaacgttcccttagacagagcagatttgaaacactctttttgtgcaattggcaagtggagatttcaagcgctttaaggtcaatggcagaaaaggaaatatcttcgtttcaaaactagacagaatcattcccacaaactgcgttgtgatgtgttcgttcaactcacagagtttaacctttcttttcatagagcagttaggaaacaatctgtttgtaaattctgtaagtggatattctgacatcttgtggccttcgttggaaacgggatttcttcatattgctgctagacagaagaattctcagtaacttccttgtgttgtgtgtattcaactcaaagagttgaacgatcctttacacagagcagacttgaaacactctttttgtggaatttgcaagtggagatttcagcctctttgaggtcaatggtagaataggaaatatcttcctatagaaactagacagaacgattctcagaaactcctttgtgatgtgtgcgttcaactcacagagtttcacctttcttttcatagagcagttaggaaacactctgtttgtaaagtctgcaagtggatattcagacctctttgaggccttcgttggaaacgggatttcttcatattctgctagacagaagaattcccagtaacttccttgtgttgtgtgtgttcaactcacagagttgaactttcatttacacagagcatctttgaaacactctttttgtggaatttgcaagtggagatttcaagcgctttgaggccaaaggcagaaaaggaaatatcttcgtttcaaaactagacagaatcattctcagaaactgctctgcgatgtgtgcgttcaactctcagagtttaacttttcttttcattcagcagtttggaaacactctgtttgtaaagtctgcacgtggataacttgaccacttagaggccttcgttggaaacgggtttttttcctgtaaggctagacagaagaattcccagtaacttccttgtgttgtgtgcattcaactcacagagttgaacgttcccttagacagagcagatttgaagcactctatttgtgcaatttgcaagtgtagatttcaagcgctttatggtcaatggcagaaaaggaaatatcttcatttcaaaactagacagaatcattcccacaaactgcgttgtgatgtgttcgttcaacacacagagtttaacctttctgttcatagagcagttaggaaaaactctgtttgtaaagtctgtaagtagatattctgacatcttgtggccttcgttggaaacgggatttcttcatattctgctagacagaagaattctcagtaacttccttgtgttgtgtgtattcctctcacagagttgaacgatcctttacacagagcagacttgaaaacagtctcttttgtggaatttgcaagtggagatttcagccgctttgaggtcaatggtagaaaaggaaatatcttcgtataaagactagacagaatgattctcagaaactcctttgtgatgtgtgtgttcaactcacagagtttaacctttcttttcatagagcagttaggaaacactctgtttataaagtctgcaagtggatattcagacccatttgaggccttcgttggaaacgggatttcttcatattatgctagacagaagaattctcagtaacttccttgtgttgtgtgtattcaactgacagagttgaactttcatttacagagagcagatttgaaacactgtttttgtggaatttgcaagtggagatttcaagcgctttgcggccaaaggcagaaaaggaaatatcttcgtataaagactagacagaatcattctcagaaactgctctgcgatgtgtgcgttcaactctcagagtttaacttttcttttcattcagcagtttggaaacactctgtttgtaaagtctgcacgtggatattttgaccacttagaggccttctttggaaacgggtttttttcctgtaaggctagacagaagaattcccaggaacttccttgtgttgtgtacattcaactcacagagttgaacgttcccttagacagagcagatttgaaacactctttttgtgcaattggcaaatggagatttcaagcgctttaaggtcaatggcagaaaaggaaatatcttcgtttcaaaactagacagaatgattctcataaactcctttgtgatgtgtgcgttcaactcacagagtttaacctttcttttcatagagcagttaggaaacactctgtttgaaaagtctgcaagtggatattcagacctccttgaggccttcgttggaaacgggaattcttcatattctgctagacagaagaattctcagtaacttccttgtgtggtgtgtattcaactcacagagttgaacgatcctttacacagagcagacttgaaacactctttttgtggaatttgcaagtggagatttcagccgctttgaggtcaatggtagaaaaggaaatatcttcgtataaagactagacagaatgattctcagaaactcctttgtgatgtgtgcgttcaactcacagagtttaacctttcttttcatagagcagttaggaaacactctgtttgtaaagtctgcaagtggatattcagacctccttgaggccttcgttggaaacgggatttcttcatattatgctagacacaagaattctcagtaacttccttgtgttgtgtgtattcaactcacagaattgaacgatcctttacacagagcagacttgaaacactctttttgtggaatttgcaagtggagatttcagccgctttgaggtcaatggtagaataggaaatatcttcctatagaaactagacagagatcattctcagaaactgctgcgtgatgtgtgcgttcaactctcagagtttaacttttcttttcattcagcggtttggaaacactctgtttgtaaagtctgcacgtggatattttgaccacgtagaggccttcgttggaaacgggtttttttcatgtaaggctagacagaagaattcccagtaacttccttgtgttgtgtgcattcaactcacagagttgaacgttcccttagacagagcagattggaaacactctgtgcaatttgcaagtgtagatttcaagcgctttaaggtcaacggcagaaaaggaaatatcttcgtttcaaaactagacagaatcattctcagaaactgctctgcgatgtgtgcgttcaactctcagagttcaacttttcttttcattcagcagtttggaaacattctgtttgtaaagtctgcacgtggataatttgactacttagaggccttcgttggaaacgggtttttttcatgtaaggctagacagaagaattctcagtaacttccttgtgttgtgtgtattcaactcacagagttgaacgatcctttacacagagcagacttgtaacactctttttgtggaattcgcaagtggagatttcagcagctttgaagtcaaaggtagaaaaggaaatatcttcctataaaaactagacagaatgattctcagaaactcctttgtgatgtgtgcgttcaactcacagagtttaaccattcttttcatagagcagttaggaaacactctgtttgtaaagcctgcaagtggatattctgacctccttgaggccttcgttggaaacgggatttcttcatattctgctagacagaagaattctcagtaacttccttgtgttgtgtgtattcaactcacagagttgaacgatcctttacacagagcagacttgaaacactctttttgtgtaatttgcaagtggagatttcatccgctttgaggtcaatagtagaaaagaaaatatcttcatagaaaaactagacagaatcattctcagaaactgctgcgtgatgtgtgcgttcaactctcacagtttaacttttcttttcattcagcggtttggaaacactctgtttgtaaagtctgcacgtggatattttgaccacttagagtccttcgttggaaacgggtttttttcatgtaaggctagacagaagaattcccagtaacttccttgtgttgtgtgcattcaactcacagagttgaacgtccattagacagagcagatttgaaacactctatttgtgcaatttgcaagtgtagatttcaagcgctttaaggtcaatggcagaaaaggaaatatcttcgtttcaaaactagacagaatcattcccacaaactgccttgtgatatgttcgttcaactcacagagtttaacctttctgttcatagagcagttaggaaacactctgtaacgtctgtaagtggatattctgacatcttgtggccttcgttggaaacgggatttcttcatattctgctagacagaagaattctcagtaacttccttgtgttgtgtgtattcaactcacagagttgaacgatcctttacacagagcagacttgaaacactctttttgtggaatttgcaagtggagatttcagccgctatggggtcaatggtagaataggaaatatcttcctatagaaactagacagaatgattctcataaactcctttgtgatgtgtgcgttcaactcacagagtttaacctttcttttcatagaacagttaggaaacactctgtttgtaaagtctgcaagtggatattcagacctccttgaggccttcgttggaaacgggatttcttcatattctgctagacagaagaattcccagtaacttccttgtgatgtgtgtgttcaactcacagagttgaactttcatttacacagagcagattggaaacactctttttgtggaatttgcaagtggagatttcaagcgctttgaggccaaaggcagaaaaggaaatatcttcgtataaaaactacacagaatcattctcagaaactgctctgcgatgtgtgcgttcaactctcagagtttaacttttcttttcattcagcagtttggaaacactctgtttgtaaagtctgcacgtggataatttgaccacttagaggccttcgttggaaacgggtttttttcctgtaaggctagacagaagaattcccagtaacttccttgtgttgtgtgcattcaactcacagagttgaacgttcccttagacagagcagatttgaaacactctatttgtgcaatttgcaagtgtagatttcaagcgctttaaggtcaatggcagaaaaggaaatatcttcgtttcaaaactagacagaatcattcccacaaactgcgttgtgatgtgttcgttcaactcacagagtttaacctttctgttcatagagcagttaggaaacactctgtttgtaaagtctgtaagtggatattctgacgtcttgtggccttcgttggaaacgggatttcttcatattctgctagacagaagaattctcagtaacttccttgtgttgtgtgtattcaactcacagagttgaacgatcctttacacagagcagacttgaaacattctttttgtggaatttgcaagtggagattttagccgctttgaggtcaatggtagaataggaaatatgttcctatagaaactagacagaatgattgtcagaaactcctttgtgatgtgtgcgttcaactcacagagtttaacctttctgttcatagagcagttaggaaacactctgtttgtaaagtctgcaagtggatattcagacctccttgaggccttcgttggaaacgggatttcttcatattctgctagacagaagaattctcagtaacttccttgtgttgtgtgtattcaactgacagagttgaactttcatttagagagagcagatttgaaacactgtttttgtggaatttgcaagtggagatttcaagcggtttggggccaaaggcagaaaaggaaatatcttcgtataaaaactagacagaatcattctcagaaactgctgcgtgatgtgtgcgttcaactctcagagtttaacttttcttttcattcagcggtttggaaacactctgtttgtaaagtctgcacgtggatattttgaccacttagaggccttcgttggaaacgggtttttttcatgtaagcctagacagaagaattcccagtaacttccttgtgttgtgtgcattcaagtcacagagttgaacgtttccttagacagagcagaattgaaacactctatttgtgcaatttgcaagtgtagatttcaaccgctttaaggtcaacggcagaaaaggaaatatcttcgtttcaaaactagacagaatgattctcagaaactcctttgtgatgtgtgcattcaactcacagtttaacctttcttttcatagagcagttaggaaacactctgtttgtaaagtctgcaagtggatattcagacctccttgaggccttcgttggaaacgggatttcttcatattatgctagacagaagaattctcagtaacttccttgtgttgtgtgtattcaactcacagagttgaacgatgctttacacagagcagacttgaaacactctttttgtggaatttgcaagtggagatttcagccgctttgaggtcaatggtagaaaaggaaatatcttcgtataaaaactagacagaatgattctcagaaactcctttgtgatgtgtgcgttcaactcacagagtttaacctttcttttcatagaacagttaggaaacactgtgtttgtaaagtctgcaagtggatattcagacctccttaaggccttcgttggaaacgggatttcttcatattatgctagacagaagaattctcagtaacttccttgtgttgtgtgtattcaactgacagagttgaactttcatttagagagagcagatttgaaacactgtttttgtggaatttgcaagtggagatttcaagcgctttggggccaaaactagacagaatgattctcagaaactcctttgtgatgtgtgcgttcaactcacagagtttaacctttcttttcattcagcggtttggaaacactctgtttgtaaagtctgcacgtggatattcagacctctttgaggccttcgttggaaacgggtttttttcatgtaaggctagacagaagaattcccagtaacttccttgtgttgtgtgcattcaactcacagagttgaacgttcctttagacagagcagatttgaaacactctatttgtgcaatttgcaagtgtagttttcaagctctttaaggtcaacggcagaaaaggaaatatcttggtttcaaaactagacagaatcattcccacaaactgcgttgtgatgtgttcgttcatctcacagagtttaacctttcttttcatagagcagttaggaaacagtctgtttgtacattctgtaagtggatatcctgacatcttgtggccttcgttggaaacgggatttcttcatattctgctagacagaagaattctcagtaacttccttgtgttgtgtgtattcaactcacagagttgaacgatcctttacacagagcagacttgaaacactctttttgtggaatttgcaagtggagatttcagccgctttgatttcaatggtagaaaaggaaatatcttcgtataaagactagacagaatgattctcagaaactcctttgtgatgtgtgcgttcaactcacagagtttaacctttcttttcatagagcagttaggaaacactctgtttgtaaagtctgcaagtggatattcagacatctatgaggccttcgttggaaacgggatttcttcatgttctgctagacagaagaattctcagtaactttccttgtgttgtgtgttttcaactcacagagttgaacgatcctttacacagagcagacttgaaacactccttttgtggaatttgcaagtggagatttcagccgctttgaggtcaatggtacaataggaaatatcttcctatagaaagtagacagaatgattctgagaaactcctttgtgatgtgtgcgttcaactcacagagtttaacctttcttttcatagagcagttaggaaacactctgtttgtaaagtctgcaagtggatattcagacatctttgaggctttctttggaaacgggatttcttcatattctgctatacagaagaattctcagaaacttccttgtgttgtgtgtattcaactcacagagttcaacgatcgtttacacagagcagacttgagacactctttttgtggaatttgcaagtggagatttcagccgctttgaggtcaatggtagaaaaggaaatatcttcatataaaaaatagacagaatcattcccacaaactgcgttgtgatgtgttcgttcaactcacagagtttaaccttcctgttcatagagcagttaggaaacactctgtttgtaaagtctgtaagtggatattctgacatcttgtggccttcgttgggaacgggatttcttcatattctgctagacagaagaattctcagaatcttccttgtgttgtgtgtattcaactcacagagttgaacgatggtttactcagagcagatttgaaacactctttttgtggaatttgcaagtggagatttcagccgctttgaggtcaatggtagaaaaggaaatatcttcgtacaaaaactagacagaatgattctcagaaactcctttgtgatgtgtgcgttcaactcacacagtttaacctttcttttcatagagcagttaggaaacactctgtttgtaaagtctgcaagtggatattcacacctccttgaggccttcgttggaaacgggatttcttcatattatgctagacagaagaattcccagtaacttccttgtgttgtgtgtgttcaactcacagagatgaactctcatttacacagagcagatttgaaactctctttttgtgtaatttgcaaatggagatttcaagcgctttgaggccaaaggcagaaaaggaaatatcttcgtataaaaactagacagaatcattctcagaaactgctctgcgatgtgtgcgttcaactctcagagtttaacttttcttttcattcagcagtttggaaacactctgtttgtaaagtctgcacgtggatattttgaccacttagaggccttcgttggaaacgggattttttcctgtaaggctagacagaagaattcccagtaacttccttgtgttgtgtgtgttcaactcactgagttgaactttcatttacccagagcagatttgaaacactctttttgtggaatttgcaagtggagatttcaagcgctttgaggccaaaggcagaaaaggaaatatcttcgtttcaaaactagacagaatcattctcagaaactgctctgcaatgtgtgcgttcaactctcagagtttaacttttcttttcattcagcagtttggaaacactctgtttgtaaagtctgcacgtggataatttgaccacttagaggccttctttggaaacgggtttttttcatgtaaggctagacagaagaattctcagtaacttccttctgttgtgtgtattcaactcacagagttgaacgttcctttacacacagcagacttgaaacactctttttgtggaatttgcaagtggagatttcagccgctttgtggtcaatggtagaaaaggaaatatcttcgtataaaaactagacagaatgattctcagaaactcctttgtgatgtgtgtgttcaactcacagagtttaacctttcttttcatagagcagttaggaaacactctgtttgtaaagtctgcaagtggatattcagacctctttgaggccttcgttggaaacgggtttttttcatgtaaggctagacagaagaattctcagtaacttccttgtgttgtgtgtattcaactgacagagttgtactttcgtttagagagagcagatttgaaacactgtttttgtggaatttgcaagtggagatttcaagcgctttggggccaaaggcagaaaaggaaatatcttcgtataaaaactagacagaatcattctcagaaactgctgcgtgatgtgtgctttcaactctcagagtttaacttttcttttcattcagcggtttggaaacactctgtgtgtaaagtctgcacgtggatattttgaccacttagaggccttcgttggaaacgggtttttttcatgtaaggctagacagaagaattctcagtaacttccttgttttgtgtgtattcaactcacagagttgaacgatcctttacacagagcagacttgtaacactctttttgtggaatttgcaagtggagatttcagccgctttgaagtcaaaggtagaaaaggaaatatcttcttataaatactaaacagaatcattcgcacaaactgcgttgtgatgtgttcgttcaactcacagagtttaacctttcttttcatagagcagttaggaaacagtctgtttgaaaattctgtaagtggatattctgacatcttgtggccttcgttggaaacgggatttcttcatattctgctagacagaagaattctcagaatcttccttgtgttgtgtgtattcaactcacagagttgaacgatggtttacacagagcagatttgaaacactcatttggtggaatttgcaagtggagatttcagccgctttgaggtcaatggtagaaaaggaaatatcttcgtataacaactagacagaattattctcagaaactcctttgtgatgtgtgcgttcaactcacagagtttaacctttcttttcatagagcagttaggaaacactctgtttgtaaggtctgcaagtggatattcagagatccttgaggccttctttggaaacgggatttcttcatattatgctggacagaagaattctcagtaacttccttgtgttgtgtgtattcaactgacagagttgaactttcatttagagagagcagatttgaaacactgtttgtgtggaatttgcaagtggagatttcaagcgctttggggccaaaggcagaaaaggtaatatcttcgtataaaaactagacagaatcattctcagaaactgctctgcgatgtgtgcgttcaactctcagagtttaacttttcttttcattcagcagtttggaaacactctgtttgtaaagtctgcacgtggataatttgaccacttagaggccttcattggaaacgggtttttttcctgtaaggctagacagaagaattcccagtaacttcccttgtgttgtgtacattcaactcacagagttgaacgttcccttagacagagcagatttgaaacactctttttgtgcaattggcaagtggtgatttcagcctctttgaggtcaatggtagaaaaggaaatatcttcgtataaaaactagacagaatgattctcagaaactcctttgtgatgtgtgtgttcaactcacagagtttaacctttcttttcatagagcagttaggaaacactctgtttgtaaagtctgcaagtggatattcagacctgctttgaggccttcgttggaaacgggtttttttcatataaggctagacagaagaattcccagtaacttccttgtgttgtgtgtgttcaactcacagagttgaactttcatttacacagagcagatttgaaacactctttttgtggaatttgcaagtggagatttcagccgctttgaggtcaatggtagaaaaggaaatatcttcgtataaaaactagacagaatgattctcagaaactcctttgtgatgtgtgcgttcaactcacagagtttaacctttcttttcatagagcagttaggaaacactctgtttgtaaactctgcaagtggatattcagacctctttgaggccttcgttggaaacgggatttcttcatactatgctagacagaagaattcttagtaacttccgcgtgttgtgtgtattcaactcacagagttgaacgatcctttacacagagcagacttgaaacactctttttgtggaatttgcaagtggagatttccgccgctatgtggtcaatggtagaaaaggaaatatcttcctataaaaactagacagaatcattctcagaaactgctgcgtgatgtgtgcgttcaactctcagagtttaacttttcttttcattcagccgtttggaaacactctgtttgtaaagtctgcacgtggatattttgaccacttagaggccttcgttggaaacgggttttttgcatgtaaggctaaacagaagaattcccagtaacttccttgtgttgtgtgcattcaactcacagagttgaacgttcccttaggcagagcagatttgaaacactctatttgtgcaatttgcaagtgtagatttcaagcgctttaaggtcaatggcagaaaaggaaatatcctcgtttcaaaactagacagaatgattctcagaaaattctttgtgatgtgtgcgttccactcacagagtttaacctttcttttcatagagcagttaggaaacactctgtttgtaaactctgcaagtggatattcagacctctttgaggccttctttgcaaacgggatttcttcatattatgcctgagagaagaattctcagtaacttcccttgtgctgtgtgtattcaactcacagagttgaacgatcctttacacagagcagacttgatacactctttttgtggaatttgcaagtggagatttcagccgctttgaggtcaatggtagaaaaggaaatatcttcgtataaaaactagacagaaatgattctcataaactcctttgtgatgtgtgcgttcaactcacagagtttaacctttcttttcatagagcagttaggaaacactctgtttgtaaagtgtgcaagtggatattcagacctccttgaggccttcgttggaaacgggatttcttcatattctgctagacagagaattcccagtaacttccttgtgttgtgtgtgttcaactcacacagttgaactttcatttacacagagcagatttgaaacactctttttgtggaatttgcaaatggagatttcagccgcgttgaggtcaacggtagaaaaggaaatatcttcgtttcaaaactagacagaatcattctcagaaactgctgcatgatgtgtgcgttcaactctcagagtttaacttttcttttcattcagcggtttggaaacactctgtttgtaaagtctgcacgtggatattttgaccacttagaggccttcgttggaaacgggtttttttcatataaggctagacagaagaattcccagtaacttccttgtgttgtgtgcattcaactcacagagttgaacgttcccttagacagagcagatttgaaacactctatttgtgcaatttccaagtgtagatttcaagcgctttaaggtcaacggcagaaaaggaaatatcttcgtttcaaaactagacagaatgattctcagaaacttctttgtgatgtgtgcgttcaactcacagagtttaacctttcttttcatagagcagttaggaaacagtctgtttgaaaattctgtaagtggatattctgacatcttgtggccttcgttggaaacgggatttcttcatattctgctagacagaagaattgtcagtaacttccttgtgttgtgtgtattcaactcacagagttgaatgatcctttacacagagcagacttgaaacactctttatgtggaatttgcaagtggagatttcagccgctttgagttcaatggtagaataggaaatatcttcctatagaaactagacagaatgattctcagaaactcctttgtgatgtgtgcgttcaactcacagagtttatcctttcttttcatagagcagttaggaaacactctgtttgtaaagtctgcatgtggatattcagacatcattgaggccttcgttggaaacgggatttcttcatgttctgctagacagaagaattctcagtaacttccttgtgttgtgtgtattcaactgacagagttgaactttcatttagagagagcagatttgaaacactgtttttgtggaattttcaagtggagatttcaagcgctttggggccaaaggcagaaaaggaaatatcttcgtataaaaactagacagaatcattctcagaaactgctctgcgatgtgtgcgttcaactatcagagtttaactttgcttttcattcagcagtttggaaacactctgtttgtaaagtctgcacgtggataatttgaccacttagaggccttcgttggaaacgggtttttttcatgtaaggctagacagaagaattcccagtaacttccttgtgttgtgtacattcaactcacagagttgaacgttcctttagacagagcagatttgaaacactctttttgtgcaattggcaaatggagatttcaagcgctttaaggtcaatggcagaaaaggaaatatcttcgtttcaaaactagacagaatcattcccacaaactgcgttgtgatgtgttcgttcaaatcacagagtttaaactttcttttcatagagcagttaggaaacagtctgtttgtaaattctgtaagtggatattctgacatcttgtggcctacgttggaaacgggatttcttcaaattctgctagacagaataattctcagtaacttccttgtgttgtgtgtattcaactcacagagttgaacgatcctttacagagagcaggcttgaaacagtctttttgtcgaatttgcaagtggagatttcagccgctttgaggtcaatggtagaataggaaatatcttcttatagaaactagacagaatgattctcagaaactcctttgtgatgcgtgcgttcaactcacagagtttaacctttcttttcatagagcagttaggaaacactctgtttgtaaagtctgcaagtggatattcagacatccttgaggctttcgttggaaacgggatttcttcatattctgctagaaagaagaattctcagtaacttccttgtgttgtgtgtattcaactgacagagttgaactttcatttagagagagcagatttgaaacactgtttttgtggaatttgcaagtggagatttcaagcgctttgtggccaaaggcagaaaaggaaatatcttcgtataaaaactagacagaatcattctcagaaactgctgcgtgatgtgtgcgttcaactctcagagtttaacttttcttttgattcagcggtttggaaacactctgtttgtaaagtctgcacgtggatattttgaccacttagaggccttcgttggaaacgggtttttttcatgtaatgctagacagaagaattcccagtaacttccttgttttgtgtgcattcaactcacagagtttaacgttcccttagacagagcagatttgaaacactctatttgtgcaatttgcaagtgtagatttcaagcgctttaaggtcaacggcagaaaaggaaatatcttcgtttcaaaactagacagaatcattcccacaaactgcgttgtgatgtgttcgttcaactcacagagtttaacctttctgttcatagagcagttaggaaacactctgtttgtaaactctgtaagtggatattctgacatcttgtggccttcgttggaaacgggatttcttcacattctgctagacagaagaattctcagtaacttccttgtgttgtgtgtattcaactcacagagttgaatgatcctttacacagaacagtcttgaaacactctttttgtggaatttgctagtggagatttcagccgctttgatgtcaatggtagaataggaaatatcttcctatagaaactagacagaatgattctcagaaactcctttgtgatgtgtgcgttcaactcacagagtttaacctttcttttcatagagcagttaggaaacactctgtttgtaaagtctgcaagtggatattcagacctctttgaggccttcgttggaaacgggtttttttcatataaggctagagagaagaattcccagtaacttccttgtgttgtgtgtgttcaactcacagagttgaactttcatttacacagagcagatttgaaacactctttttgtggaatttgcaaatggagatttcaagcgctttgaggccaaaggcagaaaaggaaatatcttcgtataaaaactggacagaatcattctcagaaactgctctgcgatgtgtgcgttcaactctcagagtttaacttttcttttcattcagcagtttggaaacactctgtttgtaaagtctgcacgtggataacttgaccgcttagaggccttcgttggaaacgggtttttttcacgtaaggctagacagaagaattcccagtaacttccttgtgttgtgtgcattcaactcacagagttgaacgttcccttagacagagcagatttgaaacactctacttgtgcaatttgcaagtgtagatttcaagcgctttaaggtcaatggcagaaaaggaaatatcttcgtttcaaaactagacagaatcattcccacaaactgcgttgtgatgtgttcgttcaactcacagagtttaacctttctgttcatagagcagttagaaaacactctgtttgtaaagtctgtaagtggatattctgacattttgtggccttcgttggaaatgggatttcttcatattctgctagacagaagaattctcagtaacttccttgtgttgtgtgtattcaactcacagagttgaactatcctttacacagagcagacttgaaacactcgttttgtggaatttgcaagtggagatttcagccgctttgaggtcaatggtagaaaaggaaatatcttcgtataaaaactagacagaatgattctcagaaactcctttgtgatgtgtgtgttcaactcacagagtttaacctttcttttcatagagcagttaggaaacactctgtttgtaaagtctgcaggtggatattcagacctctttgaggccttcgttggaaacgggtttttttcatataaggctagacagaagaattcccagtaacttccttgtgttgtctgtgttcaactcacagagttgaactttcatttacacagagcagatttgaaacactctttttgtggaatttgcaagtggagatttcaagcgctttgaggccaaaggcagaaaaggaaatatcttcgtttcaaaactagacagaatcattctcagaaactgctctgcgatgtgtgcgttcaactctcagagtttaacttttcttttcattcagcagtttggaaacactctgtttgtaaagtctgcacgtggataacttgaccacttagaggccttcgttggaaacgggtttttttcatgtaaggctagacagaagaattctcagtaacttccttgtgttgtctgtattcaactcacagagttgaacgatcctttacagagagcagacttgtaacactctttttgtggaatttgcaagtggagatttcagccactttgaagtcaaaggtagaaaaggaaataacttcctataaaaactagacagaatcattcccacaaactccgttgtgatgtgttcgttcaactcacagagtttaacctttctgttcatagagcagttaggaaacactctgtttgtaaagtctgtaagtggatattctgacatcttgtggccttcgttggaaacgggatttcttcatattctgctagacagaagaattctcagtaacttccttgtgttgtgtgtattcaactcacagagttgaacgatcctttacacagagcagacttgaaacactctttttgtggaatttgcaagtggagatttcagccgctttgaggtcaatggtagaaaaggaaatatgttcgtataaagattagacagaatgattctcagaaactcctttgtgatgtgtgtgttcaactcacagagtttaacctttcttttcatagagcagttagtaaacactctgtttataaagtctgcatgtggatattcagacccctttgaggccttcgttggaaacgggatttcttcatattatgctagacagaagaattcccagtaacttccttgtgttgtgtgtgttcaactcacagaattgaactttcatttacccagagcagatttgaaacactctttttgtggaatttgcaagtggagatttcaagcgctttgaggccaaaggcagaaaaggaaatatcttcgtttcaaaactagacagaatcattctcagaaactgctctgcgatgtgtgcgttcaactctcagagtttaacttttcttttcattcagcagtttggaaacactctgtttgtaaagtctgcacgtggatattttgaccatttagaggccttcgttggaaacgggtttttttcttgtaaggctagacagaagaattcccagtaacttccttgtgttgtgtacattcaactcacagagttgaacgttcccttagacagagcagatttgaaacactctttttgtgcaattggcaagtggagatttcaagcgctttaaggtcaatggcagaaaaggaaatatcttcgtttcaaaactagagagataatcattcccacaaactgcgttgtgatgtgttcgttcaactcacagagtttaacctttcttttcatagagcagttaggaaacagtctgtttgtcaattctgtaagtggatattctgacatcttgtggccttcgttggaaacgggatttcttcatattctgctagacagaagaattctcagtaacttccttgtgttgtgtgtattcaactcacagagttgaacgatcctttacacagaacagacttataacactctttttgtggaatttgcaagtggagatttcagccactttgaagtcaaaggtagaaaaggaaataacttcctataaaaactagacagaatgattctcagaaacttctttgtgatgtgtgcgttcaactcacagagtttaacctttcttttcatagagcagttaggaaacactctgtttgtaaactctgcaagtggaaattcagacctctttgaggccttcgttggaaacgggatttcttcatactatgctagacagaagaattcccagtaacttccttgtgttgtgtgtgttcaagtcacagagttgaactttcatttacacagagaagatttgaaacactgtttttgtggaatttgcaagtggagatttcaagcgctttgaggccaaaggcagaaaaggaaatatcttcgtttcaaaactagacagaatcattctcagaaactgctctgcgatgtgtgcgttcaactctcagagtttaacttttcttttcattcagcagtttggaaacactctgtttgtaaagtctgcacgtggatattttgaccacttagaggccttcgttggaaacgggtttttttcatgtaaggctagacagaagaattctcagtaacttccttgtgttgtgtgtattcaactcacagagttgaacgatcctatacacagagcagacttgtaacactctttttgtggaatttgcaagtggagatttcagccgctttgaagtcaaaggtagaaaaggaaatatcttcctataaaaactagacagaatgattctcagcaaactcctttgtgatgtgtgcgttcaactcacagagtttaactttttttttcatagagcagttaggaaacactctgtttgtaaagtctgcaagtggatattcagacctctttgaggccttcgttggaaacgggtttttttcatataaggctagacagaagaattctcagtaacttccttgtgttgtgtgtattcaactcacagagttgaacgatcctttacacagagcagacttgaaacactcttttagtggaatttgcaagtggagatttcagccgctttgaggtcaatggtagaataggaaatatcttcctatagaaactagacagaatgattttcagaaactcctttgtgatgtgtgcgttcaattcacagactttaacttttcatagagcagttaggaaacactctgtttgtaaagtctgcaagtggatattcagacctctttgaggccttcgttggaaacgggatttcttcatattatgctagacagaagaattctcagtaacttcctggtgttgtgtgtattcaactgacagagttgaactttcatttagagagggcagatttgaaacactgtttttgtggaatttgcaagtggagatttcaagcgctttggggccaaaggcagaaaaggaaatatcttcgtataaaaactagacagaatcattctcagaaactgctctgcgatgtgtgcgttcaactctcagagtttaactttgcttttcattcagcagttttgaaacactctgtttgtaaagtctgcacgtggataatttgaccacttagaggccttcgttggaaacgggtttttttcatgtaaggctagacagaagaattcccagtaacttccttgtgttgtgtgcattcaactcacagagttgaacgttcccttagaccgagcagatttgacacactctatttgtgcaatttgcaagtgtagatttcaagcgctttaaggtcaacggcagaaaaggaaatatcttcgtttcaaaactagacagaatcattcccacaaactgcgttgtgatgtgttcgttcaactcacagagtttaacctttcttttcatagagcacttaggaaacagtctgtttgtaaattctgtaagtggatattctgacatcttgtggccttcgttggaaacgggatttcttcatattctgctagacagaagaattctcagaatcttccttgtgttgtgtgtattcaactcacagagttgaacgatccttttcacagagcagacttgaaacactgtttttgtggaatttgcaagtggagatttcagccgcgttgaggtcaatggtagaaaaggaaatatcttcgtataaaaactagacagaatgattctcagaaacttctttgtgacgtgtgcgttcaactcacagagtttaacctttcttttcatagagcagttaggaaacactctgtttgtaaactgtgcaagtggatgttcagacctctttgaggccttcgttggaatcgggatttcttcatactgtgctagacagaagatttctcagtaacttccttgtgttgtgtgtattcaactcacagagttgaacgatcctttacacagagcggacttgaaacactctttttgtggaatttgcaagtggagatttcagccgcgttgaggtcaatggtagaaaaggaaatctcttcgtataaaaactagacagaatcattctcagaaactgctctgcgatgtgtgcgttcaactctcagagtttaacttttcttttcattcagcagtttggaaacactctgtttgtaaagtctgcacgtggatattttgaccacttagaggacttcgttggaaacgggtttttttcctgtaaggctagacagaagaattcccagtaacttccttgtgttgtgtacattcaactcacagagttgaacgttcccttagacagagcagatttgaaacactctttttgtgcaattggcaagtggagatttcaagcgctttaaggtcaatggcagaaaaggaaatatcttcgtttcaaaactagacagaatcattcccacaaactgcgttgtgatgtgttcgttcaactcacagagtttaacttttcttttcatagagcagttaggaaacactctgtttgtaaagtctgcaagtggatattcagacctccttgaggccttcgttggaaacgggatttcttcatattctgctagacagaagaattctcagtaacttccttgtgttgtgtgtattcaactcacagagttgaacgatcctttacacagagcagacttgaaacactctatttgtagaacttgcaagtggagatttcagccgctttgaggtcaatagtagaaaaggaaatatcttcgtagaaaaactagacagaatgattctcagatactcctttgtgatgtgtgcgttcaactcacagagtttaacctttcttttcatagagcagttaggaaacactgcgtttgtaaagtctgcaagtggatattcagacctccttgaggccttcgttggaaacgggatttcttcatattatgctagacagaagaattcccagtaacttccttgtgttgtgtgtgtttaactcacagagttgaactttgatttacacagagcagatttgaaacactctttttgtggaatttgcaagtggagatttcaagcgctttgaggccaaaggcagaaaaggaaatatcttcgcataaaaactagacagaatcattctcagaaactgctgcgtgatgtgtgcgttcaactctcagagtttaacttttcttttcattcagcggtttggaaacactctgtttgtgaagtctgcccgtggatattttgaccccttagaggccttcgttggaaacgggtttttttcatgtaaggctagacagaagaattctcagtaacttccttgtgttgtgtacattcaactcacagagttgaacgttcccttagacacagcagatttgaaacactctttttgtgcaattggcaagtggagatttcaagcgctttgaggtcaatggcagaaaaggaaatatcttcgtttcaaaactagacagaatcattcccacaaactgcgttgtgatgtgtgcgttcaactcaaagagtttaacctttcttttcataaagcagttaggaaacactctgtttgtaaagtctgcaagtggatattcagacctccttgaggccttcgttggaaacgggatttcttcatattctgctagacagaagaattctcagtaacttccttgtgttgtgtgtattcaactcacagagttgaaggatcctttacacagagcagacttgaaacactctttttgtggaatttgcaagtggagatttcagccgctttgaggtcaatggtagaaaaggaaactatcttcatataaagactagacagaatgattctcagaatctcctttatgatgtgtgcgttcaactcacagagtttaacctttcttttcatagagcagttaggaaacactctgtttgtaaagtctgcaagtggatattcagacctctttgaggccttcgttggaaacgggtttttttcatataagactagacagaagaattctcagtaacttccttgtgttgtgtgtattcaactcacagagttgaactttcatttacacagagcagatttgaaacactctttttgtggaatttgcaaatggagatttcaagcgctttgaggccaaaggcagaaaaggaaatatcttcgtataaaaactagacagaatcattctcagaaactgctctgcgatgtgtgcgttcaactctcagattttaacttttcttttcattcagcagtttggaaacactctgtttgtaaagtctgcacgtggatattttgaccacttagaggccttcgttggaaacggggttctttcctgtaaggctagacagaataattcccagtaacttcctagtgttgtgtgcattcaactcacagagatgaacgttcccttagacagagcagatttgaaacactctgtgcaatttgcaagtgtagatttcaagcgctttaatgtcaatggcagaaaaggaaatatcttcgcttcaaaactagacagaatcattcccacaaactgcgttgtgatgtgttcgttcaactcacagagtttaacctttcttttcatagagcagttaggaaacagtctgtttgtcaattctgtaagtggatattctgacatcttgtggcattcgttggaaacgggatttcttcatattctgctagacagaagaattctcagtaacttccttgtgtagtgtgtattcaactcacagagttgaacgatcctttacacagagcagagttgaaacactctttttgtggaatttgcaagtggagatttcaggcgctttgaggtcaatggtagaaaaggaaatatcttcgtataaagactagacagaatgattctcagaaactcctttgtgatgtgtgcgttcaactcacagagtttaacctttctattcatagagcagttaggaaacactctgtttgtcaagtctgcaagtggatactcagacctctttgaggccttcgttggaaacgggtttttttcatataaggctagacagaagaattctcagtaacttccttgtgttgtgtgtattcaactgacagagttgaactttcatttagagagagcagatttcaaacactgtttttgtggaatttgcaagtggagatttcaagcgctttggggccaaaggcagaaaaggaaatatcttcgtataaaaactagacagaatcattctcagaaactgctctgtgatgtgtgcgttcaactctcagagtttaacttttcttttcattcagtactttggaaacactctgtttgtaaagtctgcacgtggatattttgaccacttagaggccttcgatggaaacggggttttttcatttaaggctagacagaagaattcccagtaacttccttgtgttgtgtgcattcaactcacagagatgaacgttcccttagacagagcagatttgaaacactctatttgtgcaatttgcaagtgtagatttcaagctctttaaggtcaatggcagaaaaggaaatatctttgtttcaaaactagacagaatcattcccacaaactgcgttgcgatgtgttcgttcaactcacagagtttaacatttcttttcatagagcacttaggaaacagtctgtttgtaaattctgtaagtggatattctgacatcttgtggccttcgttggaaacaggatttcttcatattctgctagacagaagaattctcagtaacttccttgtgttgtgtgtattcaactcacagacttgaaggatcctttacagagaggaggcttgaaaccctctttttgtcgaatttgcaagtggagatttcagccgctttgaggtcaatggtagaataggaaatatcttcttatagaaactagacaaaatgattctcagaaactcctttgtgatgtgtgcgttcaactcacagagtttaacctttcttctcatagagcagttaggaaacactctgtttgtaaagtctgcaagtggatattcagacctctttgaggccttcgttggaaacgggtttttttcatataaggctagacagaagaattcccagtaacttccttgtgttgtgtgtgttcaactcacagagttgaactttcatttacacagagcagatttgaaacactctttttgtggaatttgcaagtggagatttcaagcgctttgaggccaaaggcagaaaaggaaatatcttcgttgcaaaactagacagaaatcattctcagcaaactgctgcgtgatgtgtgcgttcaactctcagagtttaacttttcttttcattcagcggtttggaaacactctgtttgtaaagactgcacgtggatattttgaccacttagaggccttcgttggaaaggggttttttttcatgtaaggctagacagaagaattcccagtaacttccttgtgttgtgtacattcaactcacagagttgaacgttcccttagacagagcagatttgaaacactctttttgtgcaattggcaagtggagatttcaagcgctttgaggtcaatggcagaaaaggaaatatcttcctttcaaaactagacagaatcattcccacaaactgcgttgtgatgtgttcgttcaactcacagagtttaacctttctgttcatagagcagttagcaaacactctgtttgtaaagtctgtaagtggatattcagacatcttgtggccttcgttggaaacaggatttcttcatattctgctagacagaagaattctcagaatcttccttgtgttgtgtgtattcaactcacagagttgaacgatggtttacacacagcagatttgaaacactctttttgtggtatttgcaagtggagatttcagccgctttgaggtcaatggtagaaaaggaaatatcttcgtataaaaactagacagaacgattctcagaaactcctttgtgatgtgtgcgttcaactcacagagtttaacctttctgttcatagagcagttaggaaacactctgtttgtaaagtctgcaagtggatattcagacctctttgaggccttcgttggaaacgggatttcttcatattctgctagacagaagaattcccagtaacttccttgtgttgtgtgtgttcaactcacagagttgaactttcatttacgcagagcagatttgaaacactctttttgtggaatttgcaagtggagatgtcaagcgctttgaggccaaaggcagaaaaggaaatatcttcgtttcaaaactagacagaatcattctcagaaactgctctgcgatgtgtgcgttcaactctcagagtttaacttttcttttcattcagcagtttgaaaacactctgtttgtaaagtctgcacgtggatattttgaccacttagaggccttcgttggaaacgggtttttttcctgtaaggctagacagaagaattcccagtaacttccttgtgttgagtacattcaactcacagagttgaacgttcccttagacagagcagatgtgaaacactctttttgtacaattggcaagtggagatttcaagcgctttaaggtcaatggcagaaaaggaaatatcttcgtttcaaaactagacagaatgattctcagaaacttctttgtgatgtgtgcgttcaactcacagagtttaacctttcttttcatagagcagttaggaaacactctgtttgtaaactctgcaagtggatattcagacctctttgaggccttcgttggaaacgggatttcttcatactgtgctagacataagaattctcagtaacttccttgtgttgtgtgtattcaactcacagacttgaatgatcctttacacagagcagacttgaaacactctttttgtggaatgtgcaagtggagatttcagccgctttgtggtcaatggtagaataggaaatatcttcctatagaaactagacagaatgattctcagaaactcctttgtgatgtgtacgttcaactcacagagtttaacctttcttttcatagagcagttaggaaacactctgtttgtaaagtctgcaagtggatattgagacctctttgaggccttcgttggaaacgggttttttacatataaggctagacagaagaattcccagtaagttccttgtgttgtgtgtgttcaactcacagagttgaactttcatttacacagagcagatttgaaacactctttttgtggaatttgcaaatggagatttcaagcgctttgaggccaaaggcagaaaaggaaatatcttcgtataaaaactagacagaatcattctcagaaactgctctgcgatgtgtgcgttcaactctcagagtttaacttttcttttcattcagcagtttggaaacactctgtttgtaaagtctgcacgtggataatttgaccacttagaggccttcgttggaaacgggtttttttcctgtaaggctagacagaagaattctcagtaacttccttgtgttgtgtgtattcaactcacagagttgaacgatccttcacacagagcagacttggaaaactctttttgtggaatttgcaagtggagatttcagccgctttgaagtcaaaggtagaaaaggaaatatattcctataaaaagtagacagaatcattcccacaaactgcgttgtgatgttttcgttcaactcacagagtttaacctttcttttcatagagcagttaggaaacactctgttggtaaattctgtaagtggatattctgacatcttgtggccttcgttggaaacgggatttcttcatattctgctagacagaagaattctcagtaacttccttgtgttgtgtgtattcaactcacagagttgaacgatcctttacacagagcagacttgaaacactctttttgtggaatttgcaagtggagatttcagccgctttgagctcaatggtagaataggaaatatcttcctatagaaactagacagaacgattctcagaaactcctttgtgatgtgtgcgttcaactcacagagtttaacttttcttttcatagagcagttagtaaacactctgtttataaagtctgcaagtggatattcagacccctttgaggccttcgttggaaacgggatttcttcatattatgctagacagaagaattctcagtaacttccttgtgttgtgtgtattcaactgacagagttgaactttgatttagagagagcagatttgaaacactgtttttgtggaatttgcaagtggagatttcaagcgctttggggccaaaggcagaaaaggaaatatcttcgtataaaaactagacagaatcattctcagaaactcctttgtgatgtgtgcgttcaactctcagagtttaacttttcttttcattcagcggtttggaaacactctgtttgtaaagtcagcacgtggaaattttgaccacttagaggccttcgttggaaacgggtttttttcatgtaaggctagacagaagaattcccaggaacttccttgtgttgtgtacattcaactcacagagttgaacgttcccttagacagagcagatttgaaacactctttttgtgcaattggcaagtggtgatttcagccgcattgaggtcaatggtagaaaaggaaatatcttcgtataaaaactagacagataatcattcccacaaactgcgttgtgatgtgttcgttcaactcacagagtttaacctttcttttcatagagcagttaggaaacactctgttggtaaattctgtaagtggatattctgacatcttgtggccttcgttggaaacgggatttctacatattctgctagacagaagaattctcagtaacttccttgtgttgtgtgtattcaactcacagagttgaccgatcctttacacagagcagacttgtaacactctttttgtggaatttgcaagtggagatttcagccgttttgaagtcaaaggtagaaaagggaatatcttcctataaaaactagacagaatgattctcagaaactcctttgtgatgtgtgcgttcaactcacagagtttaacttttcttttcatagagcagttaggaaacactctgtttgtaaagtctgcaagtggatattcagacctccttgaggccttcattggaaacgggatttcttcatattctgctagacagaagaattctcagtaacttccttgtgttgtgtgtattcagctcacagggttgaacgatcctttatacagagcagacttgaaacactctttttgtgggacttgcaagtggagatttcagccgctttgaggtcaataattgaaaaggaaatatcttcgtagaaaaactagacagaatcattctcagaaactgctgcgtgatgtgtgcgttcaactctcagagtttaacttttcttttcattcagcggtttggaaacactctgtttgtaaagactgcacgtggatattttgaccacttagaggccttcgttggaaacgggttttttttcatgtaaggctagacagaagaattcccagtaacttccttgtgttgtgtgcattcaactcacagagttgaacgttcccttaggcagagcagatttgaaacactctatttgtgcaatttgcaagtgtagatttcaagcgctttaaggtcaacggcagaaaaggaaatatcttcgtttcaaaactagacagaatcattcccacaaactgcgttgtgatgtattcgttcaactcacagagtttaacctttctgttcatagagcagttaggaaacactctgtttgtaaagtatgcaagtggatattcagacctccttgaggccttcgttggaaacgggatttcttcatattctgctagacagaagaattctcagtaacttccttgtgttgtgtgtattcaactcacagggttgaacgatcctttatacagagcagacttgaaacactctttttgtgggacttgcaagtggagatttcagccgctttgaggtcaataatagaaaaggaaatatcttcgtagaaaaactagacagaatgattctcagaaacttcattgtgacgtgtgcgttcaactcacagagtttaacatttcttttcatagagcagttaggaaacactctgtttgtaaagtctgcaagtggatattcagacctctttgaggccttcgttggaaacgggattttcttcatactgtgctagacagaagaattctcagtaacttccttgtgttgtgtgtattccactgacagagttgaactttcatttagagagagcagatttgaaacactgtttttgtggaatttgcaagtggagatatcaagcgctttggggccaaaggcagaaaaggaaatatcttcgtataaaaactagacagaatcattctcagaaactgctgtgtgatgtgtgcgttcaactctcagagtttaacttttcttttcattcagcggtttggaaacactctgtttgtaaagtctgcacgtggatattttgaccacttagaggccttcgttggaaacgggattttttcatgtaaggctagacagaagaattcccagtaacttccttgtgttgtgtacattcaactcacagagttgaacgttcccttagacagagcagatttgaaacactctttttgtgcaattggcaagtggagatttcaagcgctttaaggtcaatggcagaaaaggaaatatcttcgtttcaaaactagacagaatcattcccacaaactgcgttgtgatgtgttcgttcaactcacagagtttaacctttctgttcatagagcagttaggaaacactctgtttgtaaagtctgaaagtggatattctgacatcttgtggccttcgttggaaacgggatttcttcatattctgctagacagaagaattctcagtaacttccttgtgttgtgtgtattcaactcacagagttgaacgatcctttacacagagcagactagaaacactctttttgtggaatttgcaagtggagatttcagccgctttgaggtcaatagtagaaaaggaaatatcttcgtagaaaaactagacagaatgattctcagaaactcctttgtgatgtgtgtgttcaactcacagaatttaacctttcttttcatagagcagttagtaaacactctgtttataaagtctgcaagtggatattcagacccctttgaagccttcgttggaaacgggatttcttcatattatgctagacagaagaattctcagtaacttcccttgtgttgtgtgtattcaactgacagagttgaactttcatttagagagagcagatttgaaacactgtttttgtggaatttgcaagtggaaatttcaagcgctttggggtcaaaggcagaaaaggaaatatcttcgtataaaaactagacagaatcattctcagaaactgctctgcgatgtgtgcgttcaactctcagagtttaacttttcttttcattcagcagtttggaaacactctgtttgtaaagtctgcaggtggatattttgaccacttagaggccttcgttggaaacgggtattttttcctgtaaggctagaaagaataattcccagtaacttccttgtgttgtgtgcattcaactcacagagttgaacgttcccttagacagagcagatttgaaacactctatttgtgcaatttgcaagtgtagatttcaagcgctttaaggtcaatggcagaaaaggaaatatcttcgtttcaaaactagacagaatcattcccacaaactgcgttgtgatgtgttcgttcaactcacagagtttaacctttctgttcatagagcagttaggaaacactctgtttgtaaagtctgaaagtggatattctgacatcttgtggccttcgttggaaacgggatttcttcatattctgctagacagaagaattctcagtaacttccttgtgttgtgtgtattcaactcacagagttgaacgatcctttacacagagcagacttcaaacattctttttgtggaatttgcaagtggagatttcagccgctttgaggtcaatggtagaaaaggaaactatcttcatataaagactagacagaatgattctcagaaactcctttgtgatgtgtgcgttcaactcacagagtttaacctttcttttcatagagcagttaggaaacactctgtttgtaaagtctggaagtggatattcagacctccttgaggccttcgttggaaacgggatttcttcatattatgcttgacagaagaattcccagtaacttccttgtgttgtgtgtgttcaactcacagagttgaactttcatttacacagagcagatttgaaacactctttttgtggaatttgcaaatggagatttcaagcgctttgaggccaaaggcagaaaaggaaatatcttcgtttcaaaactagacagaatcattctcagaaactgctctgcgatgtgtgcgttcaactctcagagtttaacttttctttccattctgcagtttggaaacactctggttgtaaagtctgcacgtggataacttgaccacttagaggccttcgttggaaacgggtttttttcctgtaaggctagacagaagaattcccagtaacttccttgtgttgtgtgcattcaactcacagagttgaacgttcccttagacagagcagatttggaacactctatttgtgcaatttgcaagtgtagatttcaagcgctttatggtcaacggcagaaaaggaaatatcttcgtttcaaaactagacagaatcactcccacaaactgcgttgtgatgtgttcgttcaactcacagagtttaacctttctgttcatagagcagttaggaaacactctgtttgtaaagtctgcaagtgaatattcagacctccttgaggccttcgttggaaacgggatttcttcatattctgctagaccgaataattctcagtaacttccttgtgttgtgtgtattcaactcacagagttgaacgatcctttacacagagcagatttgaaacactctttttgtggaatttgcaagtggagatttcagccgctttgaggtcaatggtagaaaaggaaactaccttcatataaagactagacagaatgattctcagaaactcctttgtgatgtgtgtgttcaactcacagagtttaacctttcttttcatagagcagttagtaaacactctgtttataaagtctgcacgtggatattttgaccacttagaggccttcgttggaaacgggtttttttcatgtaaggctagacagaagaattcccagtaacttccttgtgttgtgtgtgttcgactcacagagttgaactttcatttacacagagcagatatgaaacactctttttgtggaatttgcaagtggagatttcaagcgctttgaggccaaaggcagaaaaggaaatatcttcgtttcaaaactagacagaatcattctcagaaactgctgtgtgatgtgtgcgttcaactctcaaagtttaacttttcttttcattcagcggtttggaaacactctgtttgtaaagtctgcacgtggatattttgaccacttagaggccttcgttggaaacgggattttttcatgtaaggctagacagaagaattcccagtaacttccttgtgttgtgtgcattcaactcacagagttgaacgttcccttagacagagcagatttgaaacactctatttgtgcaatttgcaagtgtagatttcaagcgctttaaggtcaatggcagaaaaggaaatatcttcgtttcaaaactagacagaatcattcccacaaactgcgttgtgatgtgttcgttcaactcacagagtttaacctttctgttcatagagcagttaggaaacactgtgtttgtaaagtctgtaagtggatattctgacatcttgtggccttcgttggaaaagggatttcttcatattctgctagacagaagaattctcagtaacttccttgtgttgtgtgtattcaactcacagagttgaacgatcctttacagagagcagactttaaggactctttttgtggaatttgcaagtggagatttcagccgctttgaggtcaatggtagaaaaggaaatatcttcgtataaagactagacagaatgattctcagaaactcctttgtgatgtgtgtgttcaactcacagagtttaacatttcttttcatagagcagttaggaaacactctgtttgtaaagtctccaagtggatattcagacctctttgaggccttcgttggaaacgggtttttttcatataaggctagacagaagaattcccagtaacttccttgtgttgtgtgtgttcaactcacagagttgaactttcatttacacagagcagatttgaaacactctttttgtggaatttgcaagtggagatttcaagcgctttgaggccaaaggcagaaaaggaaatatcttcgtttcgaaactagacagaatcattctcagaaactgctctgcgatgtgtgcgttcaactctcagagtttaacttttcttttcattcagcagtttggaaacactctgtttgtaaagtctgcacgtggatattttgaccacttagaggccttcgttggaaacgggtttttttcctgtaagggtagacagaagaattcccagtaacttccttgtgttgtgtgcattcaactcacagagttgaacgttcccttagacagagcagatttgaaacactctatttgtgtaatttgcaagtgtacatttcaagcgctttaaggtcaacggcagaaaaggaaatatcttcgtttcaaaactagacagaatcattcccacaaactgcgttgtgatgtgttcgttcaactcacagagtttaacttttccgttcatagagcagttaggaaacactctgtttgtaaagtctgcaagtggatattcagacctccttgaggccttcgttggaaatgggatttcttcatattctgctagacagaagaattctcagtaacttcccttgtgttgtgtgtattcaactcacacagttgaacgatcctttacacagagcagacttgtaacactctttttgtggaatttgcaagtggagatttcagccgctttgaagtcaaaggtagaaaaggaaatatcttcctataaaaactagacagaatgattctcagaaactcctttgtgatgtgtgcgttcaactcacagagtttaacctttcttttcatagagcagttaggaaacactctgtttgtaaagtctgcaagtggatattcagacctcctttaggacttcgttggaaacgggatttcttcatattatgctagacagaaagaattcccagtaacttccttgtgttgtgtgtgttcaactcacagagttgaactttcatttacacagagcagatttgaaacactctttttgtggaatttgcaagtggagatttcaagcgctttgaggccaaaggcagaaaaggaaatatcttcgtttcaaaactagacagaatcattctcagaaactgctgcgtgatgtgtgcgttcaactctcagagtttaacttttcttttcattcagcggtttggaaacactctgtttgtaaagactgcacgtggatattttgaccacttagaggccttcgttggaaacgggttttttttcatgtaaggctagacagaagaattcccagtaacttccttgtgttgtgtgcattcaactcacagagttgaacgttcccttagacagagcagatttgaaacactctatttgtgcaatttgcaagtgtagatttcaagcgctttaaggtcagtggcagaaaaggaaatatcttcgtttcaaaactagacagagtgattctcagaaactcctttgggatgtctgcgttcaactcacagagtttaacctttcttttcatagagcagttaggaaacactctgtttgtaaagtctgcaagtgcatattcagacctccttgaggccttcgttggaaacgggatttcttcatattctgctatacagaagaattctcagaaacttccttgtgttgtgtgtattcaactcacagagttgaacgatcgtttacacagagcagacttgagaaactctttttgtggaatttgcaagtggagatttcagccgctttgaggtcaatggtagaaaaggaaatatcttcatataaaaactagacagaatgattctcataaactcctttgtgatgtgtgcgttcaactcacagagtttaacttttcttttcatagagcagttaggaaacactctgtttgtaaagtctgcaagtggatattcagacctctttggggccttcgttggaaacgggatttcttcatattctgctagacagaataattctcagtaacttccttgtgttgtgtgtattcaactcacagagttgaacgatcctttacagagagcagacttgaaacactctttttgtggaatttgcaagtggaaattgcagccgctttgaggtcaatggtagaaaaggaaatatcttcctatagaaactagacagaatcattctcagaaactgctgcgtgatgtgtgcgttcaactctcagagtttaacttttcttttcattcagcggtttggaaacactctgtttgtaaagtctgcacgtggaaattttgaccacttagaggccttcgttggaatcgggtttttttcatgtaaggctagacagaagaattcccagtaacttccttgtgttgtgtgcattcaactcacagagttgaacgttcccttagacagagcagatttgaaacactctatttgtgcaatttgcaagtgtagatttcaagcgctttaaggtcaatggcagaaaaggaaataacttcgtttcaaaactagacagaatcattcccacaaactgccttgtgatgtgttcgttcaactcacagagtttaacctttctattcatagagcagttaggaaacactctgtaacgtctgtaagtggatattctgacatcttgtggccttcgttggaaacgggatttcttcatattctgctagacagaagaattctcagtaacttccttgtgttgtgtgtattcaactcacagagttgaaggatcctttacagagagcaggcttcaaacactctttttgtcgaatttgcaagtggagatttcagccgctttgaggtcaatggtagaataggaaatatcttcgtataaagaatagacagaatgattctcagaaactcctttgtgatgtgtgcgttcaactcacagagtttaacctttcttttcatagagcagttaggaaacactctgtttgtaaagtctgcaagtggatattcagacctctttgaggccttcgttggaaacgggtttttttcatataaggcgagacagaagaattctcagtaacttccttgtgttgtgtgtattcaactgacagagttgaactttcatttagagagagcagatttgaaacactctttttgtggaatttgcaagtggagatttcaagcgctttggggccaagggcagaaaaggaaatatcttcgtataaaaactagacagaatcattctcagaaactgctgcgtgatgtgtgcgttcaactctcagagtttaacttttcttttcattcagcggtttggaaacactctgtttgtaaagtctgcacgtggatattttgaccacttagaggcttcgttggaaacgggtttttttcatgtaaggctagacagaagaattcccagtaacttccttgtgttgtgtacattcaactcacagagttgaacgttcccttagacagagcagatttgaaacactctttttgtgcaattggcaaatggagatttcaagcgctttaaggtcaatggcagaaaaggaaatatcttcctttcaaaactagacagaatcattcccacaagctgcgttgtgatgtgttcgttcaactcacagagtttaacctttctgttcatagagcagttaggaaaccctctgtttgtaaagtctgcaagtggatattcagacctctttgaggctttcgttggaaacgggatttcctcatattctgctagacagaagaattctcagtaacttccttgtattgtgtgtattcaactcacagagttgaacgatcctttacacagagcagacttgaaacactctttttgtggaatttgcaagtggagatttcagccgctttgtgatcaatggtagaataggaaatatcttcctatagaaactagacagaatgattctcataaactcctttgtgatgtgtgcgttcaactcacagagtttaacttttcttttcatagagcagttaggaaacactctgtttgtaaagtctgcaagtggatattcagacctccttgaggccttcgttggaaacgggatttcttcatattatgctagacagaagaattcccagtaacttccttgtgttgtgtgtgttcaactcacagagttgaactttcatttacacagagcagatttgaaacactctttttgtggaatttgcaagtggagatttcacgcgctttgaggccaaaggcagaaaaggaaatatcttcgtttgaaaactagacagaatcattctcagaaactgctctgcattgtgtgcgttcaactctcagagtttaacttttcttttcattcagcagtttgaaaacactctgtttgtaaagtctgtacgtggataatttgaccacatagaggccttcgttggaaacgggtttttttcatgtaaggctagacagaagaattcccagtaacttccttgtgttgtggacattcaactcacaaagttgaacgttcccttagacagagcagacttgtaacactctttttgtggaatttgcaagtggagttttcagccgcttttaagtcaatggtagaaaaggtaatatcttccaataaaaactagacagaatcattcccacaaactgcgttgtgatgtgttcgttcaactcacagagtttaacctttctgttcatagagcagttaggaaacactctgtttgtaaagtctgcaagtggatattcagacctctttgaagccttcgttggaaacgggatttcttcatattctgctagacagaagaattctcagtaacttccttgtgttgtgtgtattcaactcacagagttgaacgatcctttacacagagcagacttgaaacactttttttgtggaatttgcaagtggaggtttcagccgctttgaggtcaatagtagaaaaggaaatatcttcgtagaaaaagtagacagaatgattctcagaaactcctttgtgatgtgtgcgttcaactcacagagtttaacctttcttttcatagagcagttaggaaacactctgtttgtaaagtctgcaagtggatattcagacctccttgaggccttcgttggaaacggtatttcttcatattctgctagacagaagaattcccagtaactttccttgtgttgtgtgtgttcaactcacagagttgaactttcatttacacagagcagatttgaaacactctttttgtggaatttgcaagtggagatttcaagcgctttgaggccaaaggcagaaaaggaaatagtcttcgtttcaaaactagacagaatcactctcagaaactgctctgcgatgtgtgcgttcaactctcagagtttaacttttcttttcattcagcagtttggaaacactctgtttgtaaagtctgcacgtggatattttgaccactcagaggccttcgttggaaacgggtttttttcctgtaaggctagacagaagaattcccagtaacttccttgtgttgtgtacattcaactcacagagttgaacgttcccttagacagagcagatttgaaacactctttttgtgcaattggcaagtggagatttcaagagatttaaggtcaatggcagaaaaggaaatatcttcgtttcaaaactagacagaatcattcccacaaactgcgttgtgatgtgttcgttcaactcacagagtttaacctttctgttcatagagcagttaggaaacactctgtttgtaaagtctgtaagtggatattctgacatcttgtggccttcgttggaaaggggatttcttcatattccgctagacagaagaattctcagtaacttccttgtgttgtgtgtattcaactcacagtagttgaacgaccctttacacagagcagacttgtaacactctttttgtggaatttgcaagtggagatttcagccactttgaagtcaaaggtagaaaaggaaataacttcctataaaaactagacagaatgattctcagaaactcctttgtgatgtctgcgttcaactcacagagtttaacctttcttttcatagagcagttaggaaacactctgtttgtaaagtctgcaagtggatattcagacctccttgaggccttcgttggaaacgggatttcttcatattctgctatacagaagaattcccagtaacttccttgtgttgtgtgtgttcaactcacagagttgaactttcatttacacagagcagatttgaaacactctttttgtggaatttgcaagtggagatttcaagcgctttgaggccaaaggcagaaaaggaaatatcttcgtatataaactagacagaatcattctcagaaactgctctgtgatgtgtgcgttcaactctcagagtttaacttttcttttcattcagcagtttggaaacactctgtttgtaaagtctgcacgtggataatttgatcacttagaggccttcgttggaaacgggtttttttcatgtaaggctagacagaagaattcccagtaacttccttgtgttgtgtgcattcaactcacagagttgaacgttcccttagacagagcagatttgaaacactctatttgtgcaatttgcaagtgtagatttcaagcgcattaaggtcaatggcagaaaaggaaatatcttcgtttcaaaattagacagaatcattcccacaaactgcgttgtgatgtgttcgttcaactcacagagtttaacctttctgttcatagagcagttaagaaacactctgtttgtaaagtctgcaagtggatattcagacctccttgaggccttcgttggaaacgggatttcttcatattctgctagacagaagaattctcagaaacttccttgtgttgtgtgttttcaactcacagagttgaacgatcctttacacagagcagacttgaaacactccttttgtggaatttgcaagtggagatttcagccgctttgaggtcaatgatagaataggaaatatcttcctatagaaagtagacagagaacgattctcagaaactcctttgtgatgtgtgcgttgaactcacagagtttaacctttcttttcatagagcagttaggaaacactctgtttgtaaagtctgcaagtggatattcagacctctttgaggccttcgttggaaacgggatttcttcatattctgctagacagaagaatccccagtaacttccttgtgttgtgtgtgttcaactcacagagttgaactttgatttacacagagcagatttgaaacactctttttgtggaatttgcaagtggagatttcaagcgctttgaggccaaaggcagaaaaggaaatatcttcgtataaaaactagacagaatcatgctcagaaactgctctgcgatgtgtgcgttcaactctcagagtttaacttttcttttcattcagcagtttggaaacactctgtttgtaaagtctgcacgtggataacttgaccacttagaggccttcgttggaaacgggtttttttcatgtaaggctagacagaagaattcccagtaacttccttgtgttgtgtgcattcaactcatagagttgaacgttcccttagacagagcagatttgaaacactctatttgtgcaatttgcaagtgtagttttcaagctctttaaggtcaacggcagaaaaggaaatatcttggtttcaaaactagacagaatcattcccacaaactgcgttgtgatgtgttcgttcaactcacagagtttaacctttcttttcatagaacagttaggaaacagtctgtttgtaaattctgtaagtggatattctgacatcttgtgaccttcgttggaaacgggatttcttcatattctgctagacagaagaattctcagaatcttccttgtgttgtgtgtattcaacccacagtagttgaacgatagtttacacagagcagatttgaaacactcatttggtggaatttgcaagtggagatttcagccgctttgaggtcaatggtagaaaaggaaatatcttcgtataacaactagacagaatgattctcagaaacttctttgtgatgtgtgtgttcaactcacagagtttaacctttcttttcatagagcagttaggaaacactgtgtttttaaactctgcaagtggatattcagacctctttgaggccttcgttggaaacgggtttcttcatactgtgctagacagaagaattcccagtaacttccttgtgttgtgtgtgttcaactcacagagttgaactttcatttacacagagcagatttgaaacactctttttgtggaatttgcaagtggagatttcaagagctttgaggccaaaggcagaaaaggaaatatcttcgtataaaaactagacagaatgattctcagaaactgctctgcgatgtgtgcgttcaactcccagagtttaacttttcttttcattcagcagtttggaaacactctgtttgtaaagtctgcacgtggataacttgaccacttagaggccttcgttggaaacgggtttttttcatgtaaggctagacagaagaattcccagtaacttccttgtgttgggtgcattcaactcacagagttgaacgttcccttagacagagcagatttgaaacagcctatttgtgcaatttgcaagtgtagatttcaagcgctttaaggtcaacggcaggaaaggaaatatcttcctttcaaaactagacagaatcattctcagaaactgctctgcgatgtgtgcgttcaactctcagagtttaactttgcttttcattcagcagtttggaaacactctgtttctaaagtctgcacgtggataatttgaccacttagaggccttcgttggaaacgggtttttttcatgtaaggctagacagaagaattctcagtaacttccttgtgttgtgtgtattcaactcacagagttgaacgatcctttacacagagcagacttgtaacactctttttgtggaatttgcaagtggagatttcagccgctttgaagtcaaaggtagaaaaggaaatatcttcctataaaaactacacagaatgattctcagaaactcctttgtgatgtgtgcgttcaactcacagagtttaaccttccttttcatagtgcagttaggaaacactctgtttgtaaagtctgcaagtggatattcagacctctttgaggccttcgttggaaacgggtttttttcatataaggctagacagaagaattcccagtaacttccttgtgttgtgtgtgttcaactcacagagttgaactttcatttacacagagcagatttgaaacactctttttctggaatttgcaaatggagatttcaagggatttgaggccaaaggcagaaatggaaatatcttcgtataaaaactagacagaatcattctcagaaactgctgcgtgatgtgtgcgttcaactctcagagtttaacttttcttttcattcagcggtttggaaacactctgtttgtaaagtctgcacgtggacattttgaccacttagaggccttcgttggaaacgggtttttttcatgtaaggctagacagaagaattcccagtaacttgccttgtgttgtgtacattcaactcacagagttgaacgttcccttagacagagcagatttgaaacactctttttgtgcaattggcaaatggagatttcaagcgctttaaggtcaatggcagaaaaggaaattgttcgtttcaaaactagacagaatgattctcagaaactcctttgtgatgtgtgcgttcaactcacagagtttaacctttctgttcatagagcagttaggaaacactctgtttgtaaagtctgcaagtggatattcagaccaccttgaggccttcggtggaaacgggatttcttcatattctgctagacagaagaattctcagtaacttccttgtgttgtgtgtattcaactcacagagttgaacgatcctttacacagagcagagttgaaacactctttttgtggaatttgcaagtggagatttcagccgctttgaggtcaatggtagaaaaggaaatatcttcgtataaagactagacagagtgtttctcagaaactcctttgtgatgtctgcgttcaactcacagagtttaacctttcttttcatagagcagttaggaaacactctgtttgtaaagtctgcaagtggatattcagacctccttgaggccttcgttggaaacgggatttcttcatattctgctatacagaagaattctcagaaacttccttctattgtgtgtattcaactcacagagttgaacgatcgtttacacagagcagactagagacactctttttgtggaatttgtaagtggagatttcagccgctttgaggtcaatggtagaaaaggaaatatcttcgtataaaaactagacagaatcattctcagaaactgctctgcgatgtgtgcgttcaactctcagagtttaacttttcttttcattcagcagtttggaaacactctgtttgtaaagtctgcacgtggataacttgaccacttagaggccttcgttggaaacgggtttttttcatgtaacgctagacagaagaattcccagtaacttccttgtgttgtgtacattcaactcacagagttgaacgttcccttagacagagcagatttgaaacactctttttgtgcaattggcaaatggagatttcaagcgctttaaggtcaatggcagaaaaggaaatatcttcgtttcaaaactagacagaatcattcccacaaactgcgttgtgatgtgttcgttcaactcacagagtttaacctttcttttcatagagcagttaggaaacagtctgtttgaaaattctgtaagtggatattctgacatccttgtggccttcgttggaaacgggatttcttcatattctgctagacagaagaattctcagtaacttccttgtgttgtgtgtattcaactcacagagttgaacgatcctttacacagagcatacttgaaacactcttgttgtggaatttgcaagtggagatttcagccgctttgaggtcaatggtagaataggaaacatcttcctatagaaactagacagaatgattctcagaaactcccttgtgatgtgtgcgttcaactcacagagtttaacctttcttttcatagagcagttaggaaacactctgtttgtaaagtctgcaagtggatattcagacctctttgaggccttcgttggaaacgggatttcttcatattatgctagacagaagaattctcagtaacttccttgtgttgtgtgttttcaactcacagagttcaacgatcctttacatagagtagacttgaaacactctttttgtggaattggcaagtggagatttcagccgctttgaggtcaatggtagaaaaggaaatatcttcgtataaaaaatagacagaaatgattctcagaaactcctttgtgatgtctgcgttcaactcacagagtttaacctttcttttcatagagcagttaggaaacactctgtttgtaaagtctgcaagtggatattcagacatccttgaggccttcgttggaaacgggatttcttcatgttctgctagacagaagaattcccagtaacttccttgtgttgtgtgtgttcaactcacagagatgaactctcatttacacagagcagatttgaaacactctttttgtggaatttgcaaatggagatttcaagcgctttgaggccaaaggcagaagaggaaatatcttcgtataaaaactagacagaatcattctcagaaacagctctgcgatgtgtgcgttcaactctcagagtttaacttttcttttcattcagcagtttggaaacactctgtttgtaaagtctgcacgtacataatttcaccacttagaggccttcgttggaaacaggtttttttcatgtaaggctagacagaagaattctcagtaacttccttgtgttgtgtgtattcaactcacagagttgaacgatcctttacacagagcagacttgaaacactctatttgtagaatttgcaagtggagatttcagctgctttgaggtcaatagtagaaaaggaaatatcttcgtagaaaaactagacagaaagattctcagaaactcctttgtgatgtgtgcgttcaactcacagagtttaacctttcttttcatagagcagttaggaaacactctgtttgtaaagtctgcaagtggatattaagacctccttgaggccttcgttggaaacgggatttcttcatattctgctagacagaagaattctcagtaacttccttgtgttctgtgtattcaactgacagagttgaactttcatttagagagagcagatttgaaacactgtttttgtggaatttgcaagtggagatttcaagcgctttggggccaaaggcaaaaaaggaaatatcttcgtataaaaactagacagaatgattctcagaaactcctttgtgatgtgtgcgttcaactcacagagtttaacctttcttttcatagagcagttaggaaacactctgtttgtaaagtctgcacgtggatattttgaccacttagaggccttcgttggaaacgggtttttttcctgtaaggctagacagaagaattcccagtaacttccttgtgttgtgtacattcaactcacagagttgaacgttcccttagacagagcagatttgaaacactctttttgtgcaattggcaaatggagatttcaagcgctttaaggtcaatggcagaaaaggaaatatcttcgtttcaaaactagacagaatgattctcagaaactcttttgtgatgtgtgcgttcaactcacagagtttaacttttcttttcatagagcagttaggaaacactctgtttgtaaagtctgcaagtggatattcagacctccttgtggccttcgttggaaacgggatttcttcatattctgctagacggaagaaatctcagtaacttccttgtgttgtgtgtattcaactcacagagttgaacgatcctttacacagagcagacttgaaacactctttttgtggaatttgcaagtggagatttcagccgctttgaggtcaatggtagaataggaaatatcttcctatagaaactagacagaatgattctcataaactcctttgtgatgtgtgcgttcaactcacagagtttaacgtttcttttcatagagcagttaggaaaaactctgtttgtaaagtctgcaagtggatattcagacctctttgaggccttcgttggaaacgggatttcttcatattatgctagacagaacaattctcagtaacttccttgtgttgtgtgtattcaactcacagagttgaacgatcctttacacagagcagacttgaaacactctttttgtggaatttgcaagtggagatttcagccgctttgaggtcaatggtagaaaaggaaactatcttcgtataaagactagacagaatcattctcagaaactgctgcgtgatgtgtgcgttcaactctcagagtttaacttttcttttcattcagcggtttggaaacacgctgtttgtaaagtctgcacgtggaaattttgaccacttagaggccttcgttggaaacgggtttttttcatgtaaggctagacagaagaattcccagtaacttccttgtgttgtgtgcattcaactcacagagttgaacgttcccttagacagagcagatttgaaacactctatttgtccaatttgcaagtgtagatttcaagcgctttaaggtcaacggcagaaaaggaaatatcttcgtttcaaaactagacagaatcattcccacaaactgcgttgtgatgtgttcgttcaactcacagagtttaacctttctgttcatagagcagttaggaaacactctgtttgtacagtctgtaagtggatattctgacatcttgtggccttcgttggaaactggatttctccatattctactagacagaagaattctcacaatcttccttgtgttgtgtgtattcaactcacagagttgaacgatggtttacacagagaagatttgaaacactctttttgtggaatttgcaagtggagatttcacccgctttgaggtcaatggtagaaaaggaaatatcttcgtataaaaactagacagaatgattctcagaaactcctttgtgatgtgtgcgttcaactcacagagattaacctttcttttcatagagcagttaggaaacactctgtttgtaaagtctgcaagtggatattcagacctctttgaggccttcgttggaaacgggatttcttcatattctgctagacagaagaattcccagtaacttccttgtgttgtgtgtgttcaactcacagagttgaactttcatttacacagagcagatttgaaacactctttttgtggaatttgcaactggagatgtcaagcgctttgaggccaaaggcagaaaaggaaatatcttcgtttcaaaactagacagaatcattctcagaaaatgctctgtgatgtgtgcgttcaactctcagagtttaacttttcttttcattcagcagtttggaaacactctgtttgtaaagtctgcacgtggatattttgaccacttagaggccttcgttggaaacgggtttttttcatgtaagggtagacagaagaattcccagtaacttccttgtgttgtgtgcattcaactcacagagttgaacgttcccttagacacagcagatttggaacactctatttgtgcaatttgcaagtgtagatttcaagcgctttaaggttaacggcagaaaaggaaatatcttcgtttcaaaactagacagaatgattctcagaacctcctttgtgatgtgtgcgttcaactcacagagttgaacctttcttttcatagagcagttaggaaacacactgtttgtaaagtctgcaagtggatattcagacatccttgaggctttcgttggaaacgggatttcttcatattctgctagaaagaagaattctcagtaacttccttgtgttgtgtgtattcaactcacagagttgaacgatcctttacacagagcagacttgaaacactctttttgtggaatttgcaagtggagatttcagccgctttgaggtcaatggaagaataggaaatatcttcctatagaaactagacagaatgattctcagaaactcctttgtgatgtgtgtgttcaactcacagagtttaacctttcttttcatagagcagttagtaaacactctgtttataaagtctgcaagtggatattcagacccctttgaggccttcgttggaaacgggatttcttcatattctgctagacagaagaattctcagtaacttccttgtgttgtgtgtattcaactcacagagttgaaggatcctttacagagagcagccttgaaacactctttttgtcgaatttgcaagtggagatttcagccgctttgaggtcaatggtagaataggaaatatcttattatagaaactagacagaatcattctcagaatctgctgcgtgatgtgtgcgttcaactctcagagtttaacttttcttttcattcagcggtttggaaacactctgtttgtaaagtctgcacgtggatattttgaccacttagaagccttctttggaaacgggttttcttcatgtaaggctagacagaagaattcccagtaacttccttgtgttgtgtgcattcaactcacagagttgaacgttcacttagacagagcagatttgaaacactctatttgtgcaatttgcaagtgtagatttcaagcgctttaaggtcaatggcagaaaaggaaatttcttcgtttcaaaactagacagaaatcattctcagaaactgctctgcgatgtgtgcgttcaactctcagagtttaactttgcttttcattcagcagtttggaaacactctgtttgtaaagtctgcacgtggataatttgaccacttagaggccttcgttggaaacgggtttttttcatgtaaggctagacagaagaattctcagtaacttccttgtgttgtgtgtattcaactcacagagttgaacgatcctttacacagagcagacttggaacactctttttgtggaatttgcaagtggagatttcagccgctttgaagtcaaaggtagaaaaggaaatatcttcctataaaaactagacagaatgattctgagaaactcctttgtgatgtgtgcgttcaactcacagagtttatcctttcttttcatagagcagttaggaaacactctgtttgtgaagtctgcaagtggatattcagacctctttgaggccttcgttggaaacgggatttcttcatattctgctagacagaagaattcccagtaacttccttgtgttgtgtgtgttcaactcacagagttgaactttcatttacacagagcagatttgaaacactctttttgtggaatttgcaattggagatttcaagcgctttgaggccaaaggcagaaaaggaaatatcttcggtataaaaactagacagaatcattctcagaaactgctctgcgatgtgtgcgttcaactctcagagtttaactttgcttttcattcagcagtttggaaacactctgtttgtaaagtcttcacgtggatattttgaccacttagaggccttcgttggaaacgggtttctttcctgtaaggctagacagaagaattcccagtaacttccttgtgttgtgtacggttcaactcacagagttgaacgttcccttagacagagcagatttgaaacactctttttgtgcaattggcaagtggagatttcaagcgctttaaggtcaatggcagaaaaggaaatatcttcgtttcaaaactagacagaatcattcccacaaactgcgttgtgatgtgttcgttcaactcacagactttaacctttcttttcatagagcagttaggaaacagtctgtttgtaaattctgtaagtggatattctgacatacttgtggccttcgttggaaacgggatttcttcatattctgctagacagaagaattctcagtaacttccttgtgttgtgtgtattcaactcacagagttgaacgatcctttacacagagcagacttgaaacactctttttgtggaatttgcaagtggagatttcagccgctttgaggtcaatggtagaataggaaatatcatcctatagaaactagacagaatgattctcagaaactcctttgtgatgtgggcgttcaactcacagagtttaaccattcttttcatagagcagttaggaaacactctgtttgtaaagtatgcatgtggatatttggacttctttgaggccttcgttggaaacgggtttttttcatgtaaggctagacagaagaattctcagtaacttccttgtgttgtgtgtattcaactcacagagttgaacgatcctatacacagagcagacttgaaacactctttttgtggaatttgcaagtggagatttcagccgctttgaggtcaatggtagaataggaaatatcttcctatagaaactagacagaatcattctcagaaactgctgcgtgatgtgtgcgttcaactctcagagtttaacttttcttttcattcagcggtttggaaacactctttttgtaagtctgcacgtggatattttgaccacttagaggccttcgttggaaacgggtttttttcatgtaaggctagacagaagaattcccagtaacttccttgtgttgtgtacattcaactcacagagttgaacgttcccttagacagagcagatttgaaacactctttttgtgcaattggcaaatggagatttcaagcgctttaagttcaatggcagaaaaggaaatatcttcgtttcaaaactagacagaatcattcccacaaactgcgttgtgatgtgttcgttcaactcacagagtttaacctttctgttcatagagcagttaggaaacactctgtttgtaaagtctgaaagtggatattctgacatcttgtggccttcgttggaaacgggatttcttcatattctgctagacagaagaattgtcagtaacttccttgtgttgtgtgtattcaactcacagagttgaacgatcctttacacagagcagacttgaaacactctttttgtggaatttgcaagtggagatttcagccgctttgagttcaatggtagaataggaaatatcttcctatagaaactagacagaacgattctcaaaaactcctttgtgatgtgtgcgttcaactcacagagtttaacctttcttttcatagagcagttaggaaacactctgtttataaagtctgcaagtggatattcagacccctttgaggccttcgttggaaacgggatttcttcatattatgctagacagaagaattctcagtaacttccttgtgttgtgtgtattcaactgacagagttgaactttcatttagagagagcagatttgaaacactgtttttgtggaatttgcaagtggagatttcaagcgccttggggccaaaggcagaaaaggaaatatcttcgtataaaaactagacagaatcattctcagaaactgctctgcgatgtgtgcgttcaactctcagagtttaacttttcttttcattcagcagtttggaaacactctgtttgtaaagtctgcacgtggataatttgaccacttagagaccttcgttggaaacgggtttttttcatggaaggctagacagaagaattcccagtaacttccttgtgttgtgtacattcaactcacagagttgaaagttcccttagacagagcagatttgaaacactctttttgtgcaattggcaaatggagatttcaagcgctttaatgtcaatggcagaaaaggaaatatcttcgtttcaaaactagacagaatcattcccacaaactgcgttgtgatgtgttcgttcaactcacagagtttaacctttcttttcatagagcagttaggaaacagtctgtttgtaaattctgtaagtggatattctgacattttgtggccttcgttggaaacgggatttcttcatattctgctagacagaagaattctcagtaacttccttgtgttgtgtgtattcaactcacagagttgaacgatcctttacacagagcagacttgtaacactctttttgtggaatttgcaagtggagatttcagccgctttgaggtcaacggtagaaaaggaaatctcttcgtataaaaactagacagaatgattctcagaaacttctttgtgatgtgtgtgttcaactcacagagtttaacctttcttttcatagagcagttaggaaacactctgcctgtaaagtctgcaagtggatattcagacctcgttgaggccttcgttggaaacgggatttcttcatattctgctagacagaagaattctcagtaacttccttgtgttgtgtgtattcaactgacagagttgaactttcatttagagagagcagatttgaaacactgtttttgtggaatttgcaagtggagatttcaagcgctttggggccaaaggcagaaaaggatatatcttcgtataaaaactagacagaatcattctcagaaactgctgcgtgatgtgtgcgttcaactctcagagtttaaagtttcttttcattcagcggtttggaaacactctgtttgtaaagtctgcaagtggatattcagacctcttggaggctttcgttggaaacgggatttcttcatattctgctagacagaagtaattcccagtaacttccttgtgttgtgtgcattcaactcacagagttgaacgttcccttagacagagcagatttgaaacactctatttgtgcaatttgcaagtgtagatttcaagcgctttaaggtcaatggcagaaaaggaaatatcttcgtttcaaaactagacagaatcattcccacaaactgcgttgtgatgtgttcgttgaactcacagagtttaacctttcttttcatagagcagttaggaaacagtctgtttgtcaattctgtaagtggatattctgacatcttgtggccttcgttggaaacgggatttcttcatattctgctagacagaagaattctcagtaacttccttgtgttgtgtgtattcaactcacagagttgaacgatcttttacacagagcagacttgaaacactctttttgtggaatttgcaagtggagatttcagccgctttgaggtcaatggtagaaaaggaaatatcttcgtataaagactagacagaatgattcttagaaactcctttgtgatgtgtgcgttcaactcacagagtttaacctttctgttcatagagcagttaggaaacactctgtttgtaaagtctgcaagtggatattcagacctcctttaggccttcgttggaaacgggatttcttcatattctgctagacagaagaattctcagtaacttccttgtgttgtgtgtattcaactcacagagttgaactatcctttacacagagcagacttgaaacactctttttgtggaatttgcaagtggagatttcagccgctttgaggtcaatggtagaaaaggaaatatcttcgtataaaaactagacagaatcattctcagaaactgctctgtgatgtgtgcgttcaactctcagagtttaccttttcttttcattcagcagtttggaaacactctgtttgtaaagtctgcacgtggataatttgaccacttagaggccttcgttggaaacgggtttttttcatgtaaggctagacagaagaattcccagtaacttccttgtgttgtgtgcattcaactcacagagttgaacgttcccttagacagagcagatttgaaacactctatttgtgcaatttgcaagtgtagatatcaagcgctttaaggtcaatggcagaaaaggaaatgtcttagtttcaaaactagacagaatgattctcagaaacttctttgtgatgtgtgcgttcaactcacagagtttaacctttcttttcatagagcagttaggaaacactctgtttgtaaactctgcaagtggatattcagacctcttggaggccttcgttggaaacgggatttcttcatagtatgctagacagaagaattctcagtaacttccttgtgttgtgtgtattcaactcacagagttgaaagatcctttacacagagcagacttgaaacactctttttgtggaatttgcaagtggagatttcagccgctttgaggtcaatagtagaaaaggaaatatcttcgtagaaaaactagacagaatgattctcagaaactcctttgtgatgtgtgcgttcaactcacacagtttaacctttcttttcatagagcagttgggaaacactctgtttgtaaagtctgcaagttgatattcagacctctttgaggccttcgtttgaaacgggatttcttcatattctgctagaaagaagaattctcagtaacttccttgtgttgtgtgtattcaactgacagagttcaactttcacttagagagagcagatttgtaacactgtttttgtggaatttgcaagtggagatttcaagcgctttggggccaaaggcagaaaacgaaatatcttcgtataaaaactagacagaatcattctcagaaaatcctctgtgatgtgtgggttcaactctcagagtttaacttttcttttcattcagcagtttggaaacactctgtttgtaaagtctgcacgtggatattttgaccacttagaggccttcgttggaaacgggtttttttcatgtaagggtagacagaagaattcccagtaacttccttgtgttgtgtgcattcaactcacagagttgaacgttcccttagacagagcagatttgaatcactctatttgtgcaatttgcaagtgtagatttcaagcgatttaaggtcaatggcagaaaaggaaatatcttcgtttcaaaactagacagaaatcattcccacaaactgcgttgtgatgtgttcgttcaactcacagagtttaacctttctgttcatagagcagttaggaaacactctgtttgtaaagtctgtaagtggatattctgacatcttgtggccttcgttggaaacgggatttcttcatattctgctagacagaagaattctcagtaacttccttgtgttgtgtgtattcaactcacagagttgaacgatcctttacacagagcagacttgaaacactcttcttgtggaatttgcaagtggagatttcagccgctttgaggtcaatggtagaaaagtaaatatcttcgtataaagactagacagaatgattctcagaaactcctttgtgatgtgtgcgttcaactcacagagtttaacctttcttttcatagagcagttaggaaacactctgcttgtaaagtctgcaagtggatattcagacctctttgaggccttcgttggaaacgggtttttttcatataaggctacacagaagaattcccagtaacttccttgtgttgtgtgtgttcaactcacagagttgaactttcatttacacagagcagatttgaaacactctttttgtggaatttgcaagtggagatttcaagggctttgaggccaaaggcagaaaaggaaatatcttcgtataaaaactagacagaatcattctcagaaactgctctgcgatgtgtgcgttcaactctcagagtttaacttttcttttcattcagcagtttggaaacactctgtttctaaagtctgcacgtggataatttgaccacttagaggccttcgttggaaacgggtttttttcctgtaaggctagacagaagaattcccagtaacttccttgtgttgtgtacattcaactcacagagttgaacgttcccttagacagagcagatttgaaacactctttttgtgcaattggcaagtggagatttcaagcgctttaaggtcaatggcagaaaaggaaatatcttcgtttcaaaactagacagaatcattcccacaaactgcgttgtgatgtgttcgttcaactcacagagtttaacctttctgttcatagagcagttaggaaacactctgtttgtaaagtctgcaagtggatattcagacctcctagaggccttcgttggaaacgggatttctccatattctgctagacagaagaattctcagtaacttccttgtgttgtgtgtattcaactcacagagttgaacgatcctttacaaagagcagacttgaaacattctttttgtggaatttgcaagtggagatttcagccgctttgaggtcaatggtagaataggaaatatgttcctatagaaactagacagaatgattctcagaaactccattgtgatgtgtgcgttcaactcaaagagtttaacttttcttttcatagagcagttaggaaacactctgtttgtaaagtctgcaagtggatattcagacccctttgaggccttcgttggaaacgggatttcttcatattatgctagacagaagaattcccagtaacttccttgtgttgtgtgtgttcaactcacagcagttgaactttcatttacacagagcagatttgaaacactctttttgtggaatttgcaagtggagatttcaagcgctgtgaggccaaaggcagaaaaggaaatatcttcgtataaaaactagacagaatcattctcagaaactgctctgcgatgtgtgcgttcaactctcagagtttaacttttcttttcattcagcagtgtggaaacactctgtttgtaaagtctgcacgtggatattttgaccacttataggccttcgttggaaacgggtttttttcctgtaaggctagacagaagaattcccagtaacttccttgtgttgtgtacattcaactcacagagttgaacgttcccttagacagagcagatttgaaacactctttttgtgcaattggcaaatggagatttcaagcgctttaaggtcaatggcagaaaaggaaatatcttcgtttcaaaactagacagaatcattcccacaaactgcgttgtgatgtgttcgttcaactcacagagtttaacctttctgttcatagagcagttaggaaacactctgtttgtaaagtctgtaagtggatattcagacatcttgtggccttcgttggaaacgggatttcttcatattctgctagacagaagaattctcagtaacttccttgtgttgtgtgtatgcaactcacagagttgaacgatcctttacacagagcagacttgaaacactctttttgtggaatttgcaattggagatttcagccgctttgaggtcaatggtagaaaaggaaactatcttcatataaagactagacagaatgattctcagaaactcctttgtgatgtgtgcgttcaactcacagagtttaacctttcttttcatagaccagttaggaaacactctgtaaagtctgcaagtggatattcagacatccttgaggccttcgttggaagcgggatttcttcatattctgctacaaagaagaattcttagtaacttccttgtgttgtgtgtattcaactcacagagttgaacgatcctttacacagagcagacttgaaacattctttttgtggaatttggaagtggagatttcagccgctttgaggtcaatggtagaataggaaatatcttcctatagaaactagacagaatcattctcagaaactgctgcgtgatgtgtgcgttcaactctcagagtttaacttttcttttcattcagcggtttggaaacactctgtttgtaaagtctgcacgtggatattttgaccacttagaggccttcgttggaaacgggtttttttcatgtaaggctcgacagaagaattcccagtaaattccttgtgttgtgtacattcaactcacagagttgaacgttcccttagacagagcagatttgaaacactctttttgtgcaattggcaagtggagatttcaagcgctttaaggtcaatggcagaaaaggaaatatcttcgtttcaaaactggacagaatcattcccacaaactgcgttgtgatgtgttcgttcaactcacagagtttaacctttcttttcatagagcagttaggaaagagtctgtttgtaaattctgtaagtggatattctgacatcttgtggccttcgttggaaacgggatttcttcatattctgctagacagaagaattctcagaaacttccttgtgttgtgtgttttcaactcacagagttgaacgatcctttacacagagcagacttgaaacactctttttgtggaatttgcaagtggagatttcagccgctttgaggtcaatggtagaataggaaatatcttcctatagaaactagacagaacgattctcagaaactcctttgtgatgtgtgcgttcaactcacagagtttaacctttcttttcatagagcagttaggaaacactctgtttgtaaagtctgcaagtggatattcagacctctttgaggccttcgttgtaacgggatttcttcctattctgctagacagaagaattcccagtaacttccatgtgttgtgtgtgttcaactcacagagttgaactttcatttacacagagcagatttgaaacactctttttgtggaatttgcaaatggagatttcaagcgctttgaggccagaggcagaaaaggaaatatcttcgtataaaaactagacagaatcattctcagaaactgctctgcgatgtgtgcgttcaactctcagagtttaacttttcttttcattcagcagtttggaaacactctgtttgtaaagtctgcatgtggataatttgaccacttagaggtcttcgttggaaacgggtttttttcatgtaaggctagacagaagaattcccagtaacttccttgtgttgtgtgcattcaactcacagagttgaacgttcccttagacagagcagatttgaaacactctatttgtgcaatttgcaagtgtagttttcaagctctttaaggtcaacggcagaaaaggaaatatcttggtttcaaaactagacagaatcattcccacaaactgcgttgtgatgtgttcgttcaactcacagagtttaacctttctgttcatagagcagttaggaaacactctgtttgtaaagtctgcaagtggatattcagacctccttgaggccttcggtggaaacgggatttcttcatattctgctagacagaagaattctcagtaacttccttgtgttgtgtgtattcaactcacagagttgaacgatcctttacacagaccagacttgaaacactctttttgtggaatttgcaagtggagatttcagccgctttgaggtcaatggtagaaaaggaaatatcttcgtataaagactagacagaatgattctcagaaactcctttgtgatgtgtgtgttcaactcacagagtttaacctttcttttcatagagcagttaggaaacactctgtttgtaaagtctgcaagtggatattcagacctctttgaggccttcgttggaaacagttttttttcatataaggctagacagaagaattcccagtaacttccttgtgttgtgtgtgttcaactcacagagttgaactttcatttacacagagcagattggaaacactctttttgtggaatttgcaagtggagatttcaagcgctttgaggccaaagacagaaaaggaaatatcttcgtataaaaactagacagaatcattctcagaaactgctctgcgatttgtgcgttcaactctcagagtttaactttgcttttcattcagcagtttggaaacactctgtttgtaaagtctgcacgtggatattttgaccacttagaggccttcgttggaaacgggtttctttcctgtaaggctagacagaagaattctcagtaacttccttgtgttgtgtgtattcaactcacagagttgaacgatcctttacagagagcagacttgaaacactctttttgtggaatttgcaagtggagatttcagccgctttgtggtcaatggtagaataggaaatatcttcctatagaaactagacagaatgattctcagaaactcctttgtgatgtgtgcgttcaactcacagagtttaacctttcttttcatagagcagttaggaaacactctgtttgtaaagtctgcaagtggatattcagacctctttgaggccttcgttggaaacgggatttcttcatgttctgctacacagaagaattctcagtaacttccttgtgttgtgtgtattcaactcacagagttgaacgatcctttacacagagcagacttgaaacactctttttgtagaatttccaagtggagatttcagccgctttgaggtcaatagtggaaaaggaaatatcttcgtagaaaaactagacagaatgattctcagaaacgcctttgtgatgtgtgcgtgcaactcacagagtttaacctttcttttcatagagcagttaggaaacactctgtttgtaaagtctgcaagtggatattcagacctctttgaggccttcgttggaaacgggtttttttcatataaggctagacagaagaattctcagtaacttccttgtgttgtgtgtattcaactgacagagttgaactttcatttagagagagcaggtttgaaacactgtttttgtggaatttgcaagtggagatttcaagcgctttggggccaaaggcagaaaaggaaatatcttcgtataaaaactagacagaatcattctcagaatctgctgcgtgatgtgtgcgttcaactctcagagtttaacttttcttttcattcagcggtttggaaacactctgtttgtaaagtctgcacgtggatattttgaccacttagaggccttcgttggaaacgggtttttttcatgtaaggctagacagaagaattcccagtaacttccttctgttgtgtgcattccactcacagagttgaacgttcccttagacagagcagatttgaaacactctatttgtgcaatttgcaagtgtagatttcaagcgctttaaggtcaatggcagaaaaggaaatatcttcgtttcaaaactagacagaatcattcccacaaactgcgttgtgatgtgttcgttcaactcacagagtttaacctttctgttcatagagcagttaggaaacactctgtttgtaaagtctgtaagtggatattctgacattttttggccttcgttggaaaagggatttcttcatattctcctagacagaagaattctcagtaacttccttgtgttgtgtgtattcaactcacagagttgaacgatcctttacacagagtagacttgaaacactctttttgtggaatttgcaagtggagatttcagccgctttcaggtcaatagtagaaaaggaaatatcttcgtagaaaaactagacagaatgattctcagaaactcctttgtgatgtgtgcgttcaactcacagagtttaacctttcttttcatagcgcagttgggaaacactctgtttgtaaagtctgcaagtggatattcagacctccttgaggctttcgttggaaacgggatttcttcatattctgctagaaagaagaattcccagtaacttccttgtgttgtgtgtgttcaactcacagagttgaactttcatttacacagagcagacttgaaacactctttttgtggaatttgcaagtggagatttcaagcgctttgaggccaaaggcagaaaaggaaatatcttcgtttcaaaactagacagaatcattctcagaaactgctctgcgatgtgtgcgttcaactctcagagtttaacttttcttttcattcagcagtttggaaacactctgtttgtaaagtctgcacgtggatattttgaccacttagaggccttcattggaaacgggtttttttcctgtaaggctagacagaagaattcccagtaacttccttgtgttgtgtgcattcaactcacagagttgaacgttcccttagacagagcagatttgaaacactctatttgtgcaatttgcaagtgtagttttcaagcgctttaaggtcaacggcagaaaaggaaattcttcgtttcaaaactagacagaatgattctcagaaactcctttgtgatgtgtgcgttcaactcacagagttcaacctttcttttaatagagcagttgggaaacactctgtttgtaaagtctgcaagtggatattcagacctccttgaggccttcgttggaaacgggatttcttcatattatgctagacagaataattctcagtaacttccttgtgttgtgtgtattcaactcacagagttgaacgatcctttacacagagcagacttgaaacattctttttgtggaatttgctagtggagatttcagccgctttgaggtcaatggtagaataggaaatatcttcctatagaaactagacagaatgattctcagaaactcctttgtgatgtgtgcgttcaactcacagagtttaacctttcttttcatagagtagttaggaaacactctgtttgtaaagtctgcaagtggatattcagacatccttgaggctttcgttggaaacgggatttcttcatattctgttagaaagaagaattcccagtaacttcccttgtgttgtgtgtgttcaactcacagagttgaactttcatttacacagagcagatttgaaacactctttttgtggaatttgcaaatggaggtttcaagcgctttgaggccaaaggcagaaaaggaaatatcttcgtataaaaactagacagaatcattctcagaaactgctgcgtgatgtgtgcgttcaactctcagagtttaacttttcttttcattcagcggtttggaaacactctgtttgtaaagtctgcacgtggatattttgaccacttagaggccttcgttggaaacgggttttttgcatgtaaggctagacagaagaattcccagtaacttccttgtgttgtgtacattcaactcacagagttgaacgttcccttagacagagcagatttgaaacactctttttgtgcaattggcaaatggagatttcaagcgctttaaggtcaatggcagaaaaggaaatattcttcgtttcaaaactagacagaatgattctcagaaaatcttttgtgatgtgtgcgttcaactcacagagtttaacttttcttctcatagagcaggtaggaaacactctgtttgtaaagtctgcaagtggatattcagacctctttgaggccttcgttggaaacgggatttcttcatattatgctagacagaataattctcagaaacttccttgtgttgtgtgtattcaactcacagagttgaaggatcctttacagagagcaggcttgaaacactctttttgtcgaatttgcaagtggagatttcagccgctttgaggtcaatggtagaataggaaatatcttcttatagaaactagacagaatgattctcagaaactcccttgtgatgtgtgcgttcaactcacagagtttaagctttcttttcatagagcagttaggaaacactctgtttgtaaagtctgcaagtggatattcagacctccttgaggccttcgttggaaacaggatttcttcatatgatgctagacagaagaattcccagtaacttccttgtgttgtgtgtgttcaactcacagagttgaactttcatttacccagagcagatttgaaacactctttttgtggaatttgcaagtggagatttcaagcgctttgaggccaaaggcagaaaaggaaatatcttcgtttcaaaactagacagaatcattctcagaaactgctctgcgatgtgtgcgttcaactctcagagtttaacttttcttttcattcagcagtttggaaacactctgtttgtaaagtctgcacgtggatattttgaccacttagaggccttcgttggaaccgggtttttttcctgtaaggctagacagaagaattcccagtaacttccttgtgttgtgtacattcaactcacagagttgaacgttcccttagacagagcagatttgaaacactctttttgtgcaattggcaaatggagatttcaagcgctttaagttcaatggcagaaaaggaaatatcttcgtttcaaaactagacagaatgattctcagaaactcctttgtgatgtgtgcgttcaactcacagagtttaacctttctgttcatagagcagttaggaaacactctgtttgtaaagtctgcaagtggatattcagacctccttgaggctttcgttggaaacgggatttcttcatattctgctagacagaagaattctcagaaacttccttgtgttgtgtgtattcaactcacagagttgaacgatcgtttacacagagcagacttgagacactctttttgtggaatttgtaagtggagattgcagccgctttgaggtcaatggtagaaaagaaaatatcttcatataaaaactagacagaatgattctcagaaactcctttgtgatgtgtgcgttcaactcacagagtttaacttttgttttcatagagcagttaggaaacactctctttgtatagtcttcaagtggatattcagacctctttgaggccttcgttggaaacgggatttcttcatattctgctagacagaagaattcccagtaacttccttgtgttgtgtgtgttcaactcacagagttgaactttcatttacacagagcagatttgaaacactctttttgtggaatttgcaagtggagatttcaagcgctttgagggcaaaggcagaaaaggaaatatcttcgtttcaaaactagacagaatcattctcagaaactgctgcgtgatgtgtgcgttcaactctcagagtttaaattttcttttcattcagcggtttggaaacactctgtttgtaaagtctgcacgtggaaattttgaccacttagaggccttcgttggaaacgggattttttcatgtaaggctagacagaagaattcccagtaacttccttgtgttgtgtgcattcaactcacagagttgaacgttccttagacacagcagatttgaaacactctatttgtgcaatttgcaagtgtagatttcaagcgctttaaggtcaatggcagaaaaggaaatatcttcgtttcaaaactagacagaatgattctcagaaactcctttgtgatgtgtgtgttcaactcacagagtttaacttttcttctcatagagcagttaggaaacactctgtttgtaaagtctgtaagtggatattctgacatcttgtggccatcgttggaaacgggatttcttcatattctgctagacagaagaattctcagtaactttccttgtgttgtgtgtattcaactcacagagttgaacgatcctttacacagagcagacttgaaacactctttttgtggaatttgcaagtggagatttcagccgctttgaggtcaatggtagaaaaggaaactatcttcatataaagactagacagaatgattctcagaaactcctttgtgatgtgtgcgttcaactcacagagtttaacctttcttttcatagagcagttaggaaacactctgtttgtaaagtctacaagtggatattcagacctccttgaggccttcgttggaaacgggatttcttcatattatgctagacagaataattctcagtaacttccttgtgttgtgtgtattcaactcacagagttgaaggatcctttacagagagcaggcttgaaatactctttttgtcgaatttgcaagtggagatttcagccgctttgaggtcaatggtagaataggaaatatcttcttatagaaactagacagaatcattctcagaaactgctgcgtgatgtgtgcgttcaactctcagagtttaacttttcttttcattcagcggtttggaaacactctgtttgtaaagtctgcacgtgggtattttgaccacttagaggccttcgttggaaacgggtttttttcatgtaaggctagacagaagaattcccagtaacttccttgtgttgtgtgcattcaactcacagagttgaacgttcccttagacagagcagatttgaaacactctatttgtgcaatttgcaagtgtagatttcaagcgctttaaggtcaatggcagaaaaggaaatatcttcgtttcaaaactagacagaatgattctcagaaaatcctttgtgatgtgtgcgttcaactcacagagtttaacttttcatatagcagttaggaaacactttgtttgtaaagtctgcaagtggatattcagacctctttgaggcattcgttggaaacgggatttcttcatattctgctagacagaagaattctcagaaacttccttgtgttgtgtgtattcaactcagagagttgaacgatcctttacacagagcagacttgaaacacactttttttggtattttcaagtggagatttcagccactttgaggtcaatggtagaaaaggaaatatcttcgtataaaaactagacagaatgattctcagaaactcctttgtgatgtgtgcgttcaactcacagagtttaacttttcttttcatagagcagttaggaaacactctgtaaagtctgcaagtgcatattcagacctctttgaggccttcgttggaaacgggatttcttcatattatgctagacagaataattctcagtaacttccttatgttgtgtgtattcaactcacagagttgaacgatcctttacaaagagcagacttgaaacactctttttgtggaattcgcaagtggagatttcagccgctttgaggtcaacagtagaaaaggaaatatcttcgtagaaaaactagacagaatcattctcagaaactgctgtgtgatgtgtgctttcaactcagagagtttaacttttcttttcattcagcagtttggaaacactctgtttgtaaagtctgcaagtggatatattgacctcttagggtccttcgttggaaacgggttttttttcatgtaaggctagacagaagaattctcagtaacttccttgtgttgtgtgtattcaactcacagagttgaacgatcctttacactgagcagacttgtaacactctttttgtggaatttgcaagtggagatttcagccgctttgaagtcaaaggtagaaaaggaaatatcttcctataaagactagacagaacgattctcagaaactcctttgtgatgtgtgcgttcaactcacagagtttaacctttcttttcatagagcagttaggaaacactctgtttgtaaagtctgcaagtggatatgcagacctctttgaggccttcgttggaaacgggatttcttcatattctgctagacagaagaattctcagtaacttaccttgtgttgtgtgtattcaactcacagagttcaacgatcctttacacagagcagacttgaaacactctttttgtggaatttgcaagtggagatttcagccgctttgaggtcaatggtagaaaaggaaatatcttcgtataaaaactaaacagaacgattctcagaaactcctttgtgatgtgtgcgttcaactcacagagtttaacctttcttttcatagagcagttaggaaacactctgtttgtaaagtctgcaaatggatattcagacctctttgaggccttcggtggaaacgggatttcttcatattctgctagacagaagaattctcagtaactttccttgtgttgtgtgtattcaactgacagagttgaactttcatttagagagagcagatttgaaacactgtttttgtggaatttgcaagtggtgatttcaagcgctttggggccaaaggcagaaaaggaaatatcttcgtataaaaactagacagaatcattctcagaaactgctgcgtgatgtgtgcgttcaactctcagagtttaacttttcttttcattcagcggtttggaaacactctgtttgtaaagtctgcacgtggaaattttgaccacttagaggccttcgttggaaacgggattttttcatgtagggctagacagaagtattctcagtaacttccttgtgttgtgtgtattcaactcacagagttaaacgatcctttacacagagcagacttgtaacactctttttgtggaatttgcaagtggagatttcagccgctttgaagtcaaaggtagaaaaggaaataacttcctataaaaactagacagaatgattctcagaaacttctttgtgatgtgtgcgttcaactcacagagtttaacatttcttttcatagagcagttaggaaacactctgtttgtaaactctgcaagtggatattcagacctctttgaggccttcgttggaaacgggatttcttcatactgtgctagacagaagaattctcagtaatttccttgtgttgtgtgtattcaactcacagagttcaacgatcctttacacagagcagacttgaaacactctttttgtggaatttgcaagtggagatttcagccgctttgaggtcaatggtagaaaagtaaatatcttcgtataaaaactagacagaatgattctcagaaactcctttgtgatgtgtgcgttcaactcacagagtttaacttttcttttcatagagcagttagtaaacactctgtttataaagtctgcaagtggatattcagacccctctgaggacttcgttggaaacgggatttcttcatattatgctagacagaagaattcccagtaacttccttgtgttgtgtgtgttcaactcacagagttgaactttcatttacacagagcagatttagaacacactttttgtggaatttgcaagtggagatttcaagcgctttgaggccaaaggcagaaaaggaaatatcttcgtataaaaactagacagaataattctcagaaactgctgcgtgatgtgtgcgttcaactctcagagtttaacttttcttttcattcagcagtttggaaacactctgtttgtaaagtctgcacgtggataatttgaccacttagaggtcttcgttggaaacgggtttttttcatgtaaggctagacaaaagaattctcagtaacttccttgtgttgtgtttattcaactcacagagttgaacgatcctttacacagagcagacttgtaacactctttttgtggaatttgcaagtggagatttcagccgctttgaagtcaaaggtagaaaaggaaatatcttcctataaaaactagacagaatgattctgagaaactcctttgtgatgtgtgcgttaaactcacacagtttaacctttcttttcatagagcagttaggaaacactctgtttgtaaagtctgcaagtggatattcagacctccttgaggccttcgttggaaacgggatttcttcatattatgctagacagaagtaattctcagtaacttccttgtgttgtgtgtattcaactcacagagttaaacgatcctttacacagagcagacgtgaaacactctttttgtggaatttggaagtggagatttcagccgctttgaggtcaatggtagaaaaggaaactatcttcatataaagactagacagaatgattctcagaaactcctttgtgatgtgtgcgttcaactcacagagtttaacctttcttttcagagagcagttaggaaacactctgtttgtaaagtctgcaagtggatattcagacatctttgaggctttcgttggaaacgggatttcttcatattctgctagacagaagaattcccagtaacttccttgtgttgtgtgtgttgaactcacagagttgaactttcatttacacagagcagatttgaaacactctttttgtggaatttgcaagtggagatttcaagcgctttgaggccaaaggcagagaaggaaatatcttcgtttgaaaactagacagaatcattctcagaaactgctctgcgatgtgtgcgttcaactctccgagtttaacttttcttttcattcagcagtttgaaaacactctgtttgtaaagtctgcacgtggataatttgaccacttagaggccttcgttggaaacggtttttttttcatgtaaggctagacagaagaattcccagtaacttccttgtgttgtgtacattcaactcacagagttgaacgttcccttagacagagcagatttgaaatactctttttgtgcaattggcaagtggagatttcaagcgctttaaggtcaatggcagaaaaggaaatatcttagtttcaaaactagacagaatcattcccacaaactgcgttgtgatgtgttcgttcaactcacagagtttaacctttcttttcatagagcagttaggaaacactctgtttgtaaagtctgtaagtggatattctgacatcttgtggccttcgttggaaacgggatttcttcatattctgctagacagaagaattctcagtaacttccttgtgttgtgtgtattcaactcacagagttgaacgatcctttacacagagcagacttggaacactctttttgtggaatttgcaagtggagatttcagccgcgttgaagtcaatggtagaaaaggaaatatcttcgtataaaaactagacagaatgattctcagaaactcctttgtgatgtgtgcgttcaactcacagagtttaacttttcttttcatagagcagttaggaaacactctgtttataaagtctgcaagtggatattcagacctctttgtggccttcgttggaaacgggatttcttcatattatactagacagaagaattctcagtaacttccttgtgttgtgtgtattcaactgacaaagttgaactttcatttagagggagcagatttgaaacactgtttttgtggaatttgcaagtggagatttcaagcgctttggggccaaaggcagaaaaggatatatcttcgtataaaaactagacagaatcattctcagaaactgctgcgtgatgtgtgcgttcaactctcagagtttaacttttcttttcattcagcggtttggaaacactctgtttgtgaagtctgcccgtggatattttgaccccttagaggccttcgttggaaacgggtttttttcatgtaaggctagacagaagaattcccagtaacttccttgtgttgtgtacattcaactcacagagttgaacgttccccttagacagagcagatttgaaacactctttttgtgcaattggcaagtggagatttcaagcgctttaaggtcaatggcagaaaaggaaatatcttcgtttcaaaactagacagaatgattctcagaaactactttgtgatgtgtgcgttcaactcacagagtttaacctttcttttcatagagcagttaggaaacactctgtttgtaaagtctgcaagtggatattcagacctccttgaggccttcgttggaaacgggatttcttcatattatgcaagacagaagaattctcagtaacttccttgtgttgtgtgtattcaactcacagagttgaacgatcctttacacagagcagacttgaaacactcttcttgtggaatttgcaagtggagatttcagccgctttgaggtcaatggtagaataggaaatatcttcgtatagaaactagacagaatgattctcagaaactcctttgtgatgtgtgcgttcaactcacagactttaacctttcttttcatagagcagttaggaaacactctgtttgtaaagtctgcaaatggatattcagacctctttgaggccttcgttggaaacgggtttttttcatataaggctagacagaagaattcccagtaacttccttgtgttgtgtgtgttcaactcacagagttgaactttcatttacacagagcagatttgaaacactctttttgtggaatttgcaagtggagatttcaagcgctttgaggccaaaggcagaaaaggagatatcttcgtataaaaactagacagaatcattctcagaaactgctgcgtgatgtgtgcgatcaactctcagagattaacttttcttttcattcagcggtttggaaacactctgtttgtaaagtctgcacgtggaaattttgaccacttagagaccttcgttggaaacgggattttttcatgtaaggctagacagaagaattcccagtaactttccttgtgttgtgtgcattcaactcacagagttgaacgttcccttagacagagcagatttgaaacactctatttgtgcaatttgcaagtgtagatttcaagcgctttaaggtcaatggcagaaaaggaaatgtcttcgtttcaaaactagacagaatcattcccaaaaactgcgttgtgatgtgttcgttcaactcacagcagtttaacctttcttttcatagagcagttaggaaacagtctgtttgtaaattctgtaagtggatattctgacatcttgtggccttcgttggaaacgggatttcttcatattctgctagacagaataattctcagtaacttccttgtgttgtgtgtattcaactcacagagttgaacgatcctttacacagagcagacttgaaacactgtttttgtggaatttgcaagtggagatttcagccgctttgagctcaatggtagaataggaaatatcttcctatagaaactagacagaatgattctcagaaactcctttgtgatgtgtgcgttcaactcacagagtttaacctttcttttcatagagcagttaggaaacactctgtttgtaaagtctgcaagtggatattcagacctctttgaggccttcgttggaaacgggatttcttcatattctgccagacagaagaattcccagtaacttccttgtgttgtgtgtgttcaactcacagagttgaactttcatttacacagagcagatttgaaacactctttttgtggaatttgcaagtggagatttcaagcgctttgaggccaaaggcagaaaaggaaatatcttcgtataaaaactacacagaatcattctcagaaactgctgcgtgatgtgtgcgttcaacactcagagtttaacttttcttttcattcagcggtttggaaacactctgtttgtaaagtcggaacgtgcatattttgaccacttagaggccttcgttggaaacgggtttttttcatgtaaggctagacagaagaattcccagtaacttccttgtgttgtgtacattcaactcacagagttgaacgttcccttagacagagcagatttgaaacactctttttgtgcaattggcaagtggagatttcaagcgctttaaggtcaatggcagaaaaggaaataacttcgtttcaaaactagacagaatcattcccacaaactgcgttgtgatctgttaggtaaactcacagagtttaaccattcttttcatagagcagttaggaaacagtctgtttgtaaattctgtaagtggatattctgacatcttgtggccttcgttggaaacgggatttcttcatattctgctagacagaagaactctcagaatcttccttgtgttgtgtgtattcaactcacagagttgaacgatggtttacacagagcagatttgaaacactctttttgtggaatttgcaagtggagatttcagccgctttgaggtcaatggtagaaaaggaaatatcttcgtataaaaactagacagaatgattctcagaaactcctttgtgatgtgtgtgttcaactcacagagtttaacctttctattcatagagtagttaggaaacactctgtttgtaatgtctgcaagtggatattttgacctctttgaggccttcgttggaaacgggtttttttcatgtaaggctagacagaagaattctcagtaacttccttgtgttgtgtgtattcaactgacagagttgaactttcatttagagagagcagatttgaaacactgtttttgtggaatttgcaagtggagatttcaagcgctttggggccaaaggcagaaaacgaaatatcttcgtataaaaactagacagaatcattctcagaaactgctgcgtgatgtgtgcgttcaactctcagagtttaacttttcttttcattcagcggtttggaaacactctcgtttgtaaagcctgcacgtggatattttgaccacttagaggccttcgttggaaacgggtttttttcatgtaaggctagacagaagaattcccagtaacttccttgtgttgtgtgcattcaactcacagagttgaacgttcccttagacagagcagatttgaaacactctatttgtgcaatttgtaagtgtagttttcaagctctttaaggtcaacggcagaaaaggaaatatcttcgtttcaaaactagatcagaatcattcccacaaactgcgttgtgatgtgttcgttcaactaacagagtttaacctttcttttcatagagcagttaggaaacactctgttggtaaattctgtaagtggatattctgacatcttgtggccttcgttggaaacgggatttctacatattctgctagacagaggaattctcagtaacttccttgtgttgtgtgtattcaactcacggagttgaacgatcctttacacagagcagacttgaaacactctttttgtggaatttgcaagtggagatttcagccgctttgaggtcaatagtagaaaaggaaatatcttcgtagaaaaactagacagaatgattctcagaaactcctttgtgatgtgtgtgttcaactcacagagtttaacctttcttttcatagagcagttagtaaacactctgtttataaagtctgcaagtggatattcagacccatttgaggccttcgttggaaacgggatttcttcatattctgctagacagaagaattcccagtaacttccttgtgttgtgtgtgttcaactcacagagttgaactttcatttacacagagcagatttgaaacactctttttgtggaatatgcaagtggagatttcaagcgctttgagaccaaaggcagaaaaggaactatcttcgtttgaaaactagacagaatcattctcagaaactgctctgcgatgtgtgcgttcaactctcagagtttaacttttcttttcattcagcagtttggaaacactctgtttgtaaagtctgcacgtggatattttgaccacttagaggccttcgttggaaacgggtttttttcctataaggctagacagaagaattcccagtaacttccttgtgttgtgtacattcaactcacagagttgaacgttcccttagacagagcagatttgaaacactctttttgtgcaattggcaagtggagatttcaagcgctttaaggttaatggcagaaaaggaaatatcttcgtttcaaaactagacagaatcattcccacaaactgcgttgtgatgtgttcgttcaacacacagagtttaacctttcttttcatagagcagttaggaaacagtctgtttgtaaattctgtaagtggatattctgacatcttgtggccttcgttggaaacgggatttcttcatattctgctagacagaagaattctcagtaacttccttgtgttgtgtgtattcaactcacagagttgaacgatcctttacacagagcagatttgaaacactctttttctggaatttgcaagtggagatttcagccgctttgtggtcaatggtagaaaaggaaatatcttcatataaaaactagacagaatgattctcagaaactcctttgagatgtgtgtgttcaactcacagagtttaacctttcttttcatagagcagttaggaatcactctgtttgtaaagtctgcaagtggatattcagacctctttgaggccttcgttggaaaagggtttttttcatataaggctagagagaagaattcccagtaacttccttgtgttgtgtgtgttcaactcacagagttgaacttccatttacacagagcagatttgaaacactctttttgtggaatttgcaagtggagatttcaagcgctttgaggccaaaggcagaaaaggaaatatcttcgtttcaaaactagacagaatcattctcagaaactgctctgcgatgtgtgcgttcaactctcagagtttaacttttcttttcattcagcagtttggaaacactctgtttgtaaagtctgcacgtggatattttgaccacttagaggccttcgttggaaacgggtttttttcctgtaagactagacagaagaattcccagtaacttctttgtgttgtgtacattcaactcacagagttgaacgttcccttagacagagcagatttgaaacactctttttgtgcaattggcaagtggagatttcaagcgctttaaggtcaatggcagaaaaggaaatatcttcgtttcaaaactagacagaatgattctcagaaactcctttgtgatgtgtgcgttcaactcacagagtttaacctttgttttcatagagcagttaggaaacactctgtttgtaaagtctgaaagtggatattcagacctctttgaggccttcgttggaaacgggtttttttcatataaggctagagagaagaattcccagtaacttccttgtgttgtgtgtattcaactcacagagttgaacgatcctttacacagagcagacttgtaacactctttttgtggaatttgcaagtggagatttctgccgctttgaagtcaaaggtagaaaaggaaatatcttcctataaaaactagacagaatgattctcagaaactcctttgtgatgtgtgcgttcaactcacagagtttaccctttcttttcatagagcagttaggaaacactctgtttgtaaagtttgcaagtggatattcagacatccttgaggctttcgttggaaacgggatttcttcatattctgccagaaagaagaattcccagtaacttccttgtgttgtgtgtgttcaactcacagagttgaacattcatttacacagagcagatttgaaacactctttttgtggaatttgcaagtggagatttcaagcgctttgaggccaaaggcagaaaaggaaatatcttcgtttcaaaactagacagaatcattctcagaaactgctctgcgatgtgtgcgttcaactctcagagtttaacttttcttttcattcagcagtttggaaacactctgtttgtaaagtctgcacgtggatattttgaccacttagaggccttcgttggaaacggttttttttcctgtaaggctaaaaagaagaattctcagtaacttccttgtgttgtgtgtattcaactcacacagttgaacgatcctttacacagagcagacttgtaacactctttttgtggaatttgcaagtggggatttcagccgctttgaagtcaaaggtagaaaaggaaatatcttcctataaaaactagacagaatgattctcagaaactcctttgtgatgtgtgctttcaactcacagagtttaacctttcttttcatagagcagttaggaaacactctgtttgtaaagtctgcaagtggatattcagacctctttgaggccttcgttggaaacgggtttttttcatataaggctagacagaagaattctcagtaacttccttgtgttgtgtgtattcaactcacagtgttgaacgatcctttacacagagcagacttgaaacactctttttgtggaatttgcaagtggagatttcagccgctttgaggtcaatagtagaaaaggaaatatcttcgtagaaaaactagacagaatgattctcagaaactcctttgttatgtgtgcgttcaactcacagagtttaacctttcttttcatagagcagttaggaaacactctgtttgtaaagtctgcaagtggatattcagacatccttgaggctttcgttggaaacgggatttcttcatattctgctagaaagaagaattcccagtaacttccttgtgttgtgtgtgttcaactcacagagttgaactttcatttacacagagcagatttgaaacactctttttgtggaatttgcaaatggagatttcaagcgctttgaggccaaatgcagaaaagaaaatatcttcgtataaaaactagacagaatcattctcagaaactgctctgcgatgtgtgcgttcaactctcagagtttaacttttcctttcattcagcagtttggaaacactctgtttgtaaaatctgcacgtgcataatttgaccacttagaggccttcgttggaaacgggttttttccatgtaaggctagacagaagaattcccagtaacttccttgtgttgtgttcattcaactcacagagttgaacgttcccttagacagagtagatttgaaacactctttttgtgcaattggcaagtggagatttcaagcgatttaaggtcaatggcagaaaaggaaatatcttcgtttcaaaactagacagaatcattcccacaaactgcgttgtgatgtgttcgttcaactcacagagtttaacctttctgttcatagagcagttaggaaacactctgtttgtaaagtctctaagtggatattctgacatcttgtggccttcgttggaaacgggatttcttcatattctgctagacagaagaattctcagtaacttccttgtgttgtgtgtattcaactcacagagttgaacgatcctttacacagagcagacttgaaacactctttttgtggaatttgcaagtggagatttcagccgctttgaggtcaatggtagaaaaggaaatctcttcgtataaagactagacagaatgattctcagaaactcctttgtgatgtgtgcgttcaactcacagagtttaacctttcttttcatagagcagttaggaaacactctgtttgtaaagtctgcaagtggatattcagacttctttgaggctttcgttggaaacgggatttcttcatattctgctatacagaagaattcccagtaacttccttgtgttgtgtgtgttcaactcacagagttgaactttcatttacacagagcagatttgaaacactctttttgtggaatttgcaaatggagatttcaagcgctttgaggccaaaggcagaaaaggaaatatcttcgtataaaaactcgacagaatcattctcagaaactgctctgcgatgtgtgcgttcaactctcagagtttaacttttcttttcattcagcagtttggaaacactctgtttgtaaagtctgcacatggaaaacttgaccacttagaggccttcgttggaaacgggttttttttatgtaaggctagacagaagaattctcagtaacttccttgtgttgtgtgtattcaactcaaagagttgaacgatcctttacacagagcagacttgtaacactctttttgtggaatttgcaagtggagatttcagccgctttgaagtcaaaggtagaaaatgaaatatcttcctataaaaactagacagaatcattcccacaaactgcgttgtgatgtgttcgttcaactcacagagtttaacctttctgttcatagagcagttaggaaacactctgtttgtaaagtctgtaagtggatattctgacatcttgtggccttcgttggaaacgggatttcttcgtattctgctagacagaagaattctcagtaacttccttgtgttgtgtgtattcaactcacaggatttgaacgatcctttacacagagcggacttgaaacactctttttgtggaatttgcaagtggagatttcagccgcgttgaggtcaatggtagaaaaggaaatatcttcgtataaaaactagacagagtgattctcagaaactcctttgtgatgtctgcgttcaactgacagagtttaacctttcttttcatagagcagttaggaaacactctgtttgtaaagtctgcaagtggatattcagacctccttgaggccttcgttggaaacgggatttcttcatattctgctatacagaagaattcccagtaacttccttgtgttgtgtgtgttcaactcacagagatgaactctcatttacacagagcagatttgaaacactctttttgtggaatttgcaagtggagatttcaagcgctttgaggccaaaggcagaaaaggaaatatcttcgtataaaaactagacaaaatcattctcagaaactgctctgcgatgtgtgtgttcaactctcagagtttaacttttcttttcattcagcagtttggaaacactctgtttgtaaagtctgcacgtggataatttgaccacttagaggccttcgttggaaacgggtttttttcatgtaaggctagacagaagaattcccagtaaattccttgtgttgtgtacattcaactcacagagttgaacgttcccttagacagagcagatttgatacactctttttgtgcaattggcaagtggagatttcaagcgctttaaggtcaatggcagaaaaggaaatatcttcgtttcaaaactagacagaatgattctcagaaactcctttgtgatgtgtgcgttcaacacacagagtttaacttttcttttcatagagcagttaggaaacactctgtttgtaaagtctgcaagtggatattcagacctctttgaggccttctttggaaacgggatttcttcatattatgctagacagaataattctcagtaacttccttgtgttgtgtgtattcaagtcacagagttgaacgatcctttacagagagcagacttgaaacactctttttgtggaatttgcaagtggagatttcagccgctttgaggtcaatagtagaaaaggaaatatcttcgtagaaaaactagaaagaatgattctcagaaactcctttgtgatgtgtgtgttcaactcacagagtttaacctttcttttcatagagcagtttggaaacactctgtttgtaaagtctgcaagtggatattcagacctcgttgaggccttcgttggaaacgggatttcttcatattctgctagacagaagaattcccagtaacttccttgtgttgtgtgtgttcaactcacagagttgaactttgatttacacagagcagatttgaaacactctttttgtggaatttgcaagtggaaatttcaagcgctttgaggccaaaggcagaaaaggaaatatcttcgtataaaaactagacagaatcattctcagaaactgctgtgtgatgtgtgcgttcaactctcagagtttaacttttcttttcattcagcggtttggaaacactctgtttgtaaagtctgcacgtggatattttgaccacttagaggccttcgttggaaacgggtttttttcatgtaaggctagacagaagaattcccagtaacttccttgtgttgtgtgcattcaactcacagagatgaacgttcccttagacagaacagatttgaaacactctatttgtgcaatttgcaagtgtagatttcaagcgctttaaggtcaatggcagaaaaggaaatatcttcgtttcaaaactagacagaatcattcccacaaactgcgttgtgatgtgttcgttcaactcacagagtttaacctttctgttcatagagcagttaggaaacactctgtttctaaagtctgtaagtggatattctgacatattgtggccttcgttggaaacgggatttcttcatattctgctagacagaaaaattctcagtaacttctttgtgttgtgtgtattcaactcacagagttgaacgatcctttacacagagcagacttgaaacactctttttgtggaatttgcaagtggagatttcagccgctttgaggtcaacggtagaataggaaatatcttcctatagaaactagacagaattattctcagaaactcctttgtgatgtgtgcgttcaactcacagagtttaacctttcttttcatagagcagttaggaaacactctgtttgtaaggtctgcaagtggatattcagagctccttgaggccttctttggaaacgggatttcttcatattatgctggacagaagaattctcagtaatttccttgtgttgtgtgtattcaactcacagagttgaacgatcctttacacagagcagacttgaaacactctttttgtggaatttgcaaggagatttcagccgctttgaggtcaatggtagaataggaaatatgtacctatagaaactagacagaatgattctcagaaactcctttgtgatgtgtgcgttcaactcacagaggttaacctttcttttcatagagcagttaggaaacactctgtttgtaaagtctgcaagtggatattcagacctccttgaggccttcgttggaaacgggatttcttcatattatgctagacagaagaattcccagtaacttccttgtgttgtgtacattcagctcacagagttgaacgttcccttagacagagcagatttgaaacactctttttgtgcaattggcaaatggagatttcaagcgctttaaggtcaatggcagaaaaggaaatatcttcgtttcaaaactagacagaagcattcccacaaactgcgttgtgatgtgttcgttcaactcacagagtttaacctttcttttcatagagcagttaggaaacagtctgtttgtcaattctgtaagtggatattctgacatcttgtggccttcgttggaaacgggatttcttcatattctgctagacagaagaattctcagtaacttccttgtgttgtgtgtattcaactcacagagttgaacgatcctttacacagagcagacttgaaacactctttttgtggaatttgcaagtggagatatcagccgctttgaggtcaatggtagaataggaaatatcttcctatagaaaatagacagaatgattctcagaaactcctttgtgatgtgtgtgttcaactcacagcagtttaacctttcttttcatagagcagttagtaaacactctgtttataaagtctgcaagtggatattcagacccctttgaggccttcgttggaaacgggatttcttcatattatgctagacagaagaattcccagtgacttccttgtgttgtgtgtgttcaactcacagagttgaactttcatttacccagagcagatgtgaaacactctttttgtggaatttgcaagtggagatttcaagcgctttgaggccaaaggcagaaaaggaaatatcttcgtttcaaaactagacagaatcattctcagaaactgctgcgtgatgtgtgcgttcaactctcagagtttaacttttcttttcattcagcggtttggaaacactctgtttgtaaagtctgcacgtggatattttgaccacttagaggccttcgttggaaacggaattttttcatgtgaggctagacagaagaattcccaagtaacttccttgtgttgtgtacattcaactcacagagttgaacgttcccttagacagagcagatttgaaacactctttttgtgcaattggcaaatggagatttcaagcgctttaaggtcaatggcagaaaaggaaatatcttcgtttcaaaactagacagaatcattcccacaaactgcgttgtgatgtgttcgttcaactcacagagtttaacctttctgttcatagagcagttaggaaacactctgtttgtaaagtctgtaagtggctattctgacatcttgtggcctttgttggaaacgggatttcttcatattctgctagacagaagaattctcagtaacttccttgtgttgtgtgtattcaactcacagagttgaacgatcctttacacagagcagacttgaaacacactttttgtggaatttgcaagtggagatttcagccgctttgaggtcaatggtagaaaaggaaatatcttcgtataaagactagacagaatgattctcagaaacgcctttgtgatgtgtgctttcaactcacagagtttaacttttcttttcatagagcagttaggaaacactctgtttataaagtctgcaagtggatattcagacctctttgaggtcttcgttggaaacgggatttctccatactatgctagacagaagaattcccagtaacttccttgtgttgtgtgtgttcaactcacagagttgaactttcatttacacagagcagatttgaaacactctttttgtggaatttgcaagtggagatgtcaagcgctttgaggccaaaggcagaaaaggaaatatcttcgtttcaaaactagacagaatcattctcagaaactgctctgcgatgtgtgcgttcaactctcagagtttaacttttcttttcattcagcagtttggaaacactgtgtttgtaaagtctgcacgtggataatttgaccacttagaggtcttcgttggaaacgggtttttttcatgtaaggctagacagaagaattctcagtaacttccttgtgttgtgtgtattcaactcacagagttgaacgatcctttacacagagcagacttgtaacactctttttgtggaatttgcaagtggagatttcatccgctttgaagtcaaaggtagaaaaggaaatctcttcgtataaaaactagacagaatgattctcagaaacttctttgtgatgtgtgcgttcaacacatagagtttaacctttcttttcatagagcagttaggaaacactctgtttgtaaagtctgcaagtggatattcagacctctttggggccttcgttggaaaagagatttcttcatactgtgctagacagaagaattctcagtaacttccttgtgttgtgtgtattcaactcacagagttgaacgatcctttacacagagcagacttgtcacactctttttgtggaatttgcaagtggagatttcagccgctttgaagtcaaaggtagaaaaggaaatatcttcctataaaaactagacagaatgattctcagaaactcctttgtgatgtgtgcgttcaactcacagagtttaacctttcttttcatacagcagttaggaaacactctgtttctaaagtctgcaagtggatattcagacctccttgaggccttcgttggaaacgggatttcttcatattatgctagacagaagaattctcagtaacttccttgtgttgtgtgtattcaactgacagagttgaactatcatttacagagagcagatttgaaacactgtttttgtggaatttgcaagtggagatttcaagcgctttggggccaaaggaagaaaaggaaatatcttcgtataaaaactagacagaatcattctcagaaactgctctgcgatgtgtgcgttcaactctcagagtttaacttttcttttcattcagcagtttggaaacactctgtttgtaaagtctgcacgtggatattttgaccacttagaggccttcgttggaaacgggtttttttcttgtaaggctagacagaagaattcctagtaacttccttgtgttgtgtacattcaactcacagagttgaacgttcccttagacagagcagatttgaaacactctttttgtgcaattggcaagtggagatttcagccgctttgaggtccatggtagaaaaggaaatatcttcgtataaaaactagacagaatcattcccacaaactgcgttgtgatgtgttcgttcaactcacagagtttaacctttctgttcatagagcagttaggaaacactctgtttgtaaagtctgtaagtggatattctgacatcttgttgccttgttggaaaagggatttcttcatattctggtagacagaagaattctcagtaacttcccttgtgttgtgtgtattcaactcacagagttgaacgatcctttacacagagcagacttgaaacactctttttgtggaatttgcaagtggagatttcagccgctttgaggtcaatggtagaataggaaatatcttcctatagaaactagacagaatgattctcagaaactcctttgtgatgtgtgcgttcaactcaaagagtttaacctttcttttcatagagcagttaggaaacactctgtttgtaaagtctgcaagtggatattcagacatccttgaggctttcgttggaaacgggatttcttcatattctgctagaaagaagaattcccagtaacttcgttgtgttgtgtgtgttcaactcacagagttgaacttccatttacacagagcagatttgaaacactctttttgtggaatttgcaagtggagatttcaagcactttgaggccaaaggcagaaaaggaaatatcttcgtttcaaaactagacagaatcattctcagaaactgctgcgtgatgtgtgcgttcaactctcagagtttaacttttcttttcattcagcggtttggaaacactctgtttgtaaagtctgcacgtggatattttgaccacttagaggccttcgttggaaacgggttttttttatgtaaggctagacagaagaattcccagtaacttccttgtgttgtgtgcattcaactcacagagttgaacgttcccttagacagagcagatttgaaacactctatttgtgtaatttgcaagtgtagatttcaagcgctttcaggtcaacggcagaaaaggaaatatcttcgtttcaaaactagacagaatcattcccacaaactgcgttgtgatgtgttcgttcaactcacagagtttaaccttcctgttcatagagcagttaggaaacactctgtttgtaaagtctgcaagtggatattcagacctccttgaggccttcgttggaaacgggatttcttcatattctgctagacagaagaattctcagtaactgccgtctgttgtgtgtattcaactcacagagttgaacgatcctttacacagagcagacttgaaacactctttttgtggaatttgcaagtggagatttcagccgctttgaggtcaatggtagaataggaaatatcttcctatagaaactagacagaatgattctcagtaaactcctttgtgatgtgtgtgttcaactcacagagtttaacctttcttttcatagagcagttaggaaacactctgtttgtaaagactgcaggtggatattcaggcctctttgaggccttcgttggaaacgggtttttttcatataaggctagacagaagaattcccagtaacttccttgtgtgtgttcaactcacagagttgaactttcatttacacagagcagatttgaaacactctttttgtggaatttgcaaatggagatttcaagcgctttgaggccaaaggcagaaaaggaaatatcttcgtataaaaacgagacagaatcattctcagaaactcctttgtgatgtgtgcgttcaactctcagagtttaacttttcttttcattcagcggtttggaaacactctgtttgtaaagtctgcacgtggaaattttgaccacttagaggccttcgttggaaacgggtttttttcatgtaaggctagacagaagaattcccagtaacttccttgtgttgtgtgcattcaactcacagagttgaacgttcccttagacagagcagatttgaaacactctatttgtgcaatttgcaagtgtagttttcaagctctttaaggtcaacggcagaaaaggaaatatcttcgtttcaaaactagacagaatgattctcagaaactcctttgtgctgtgtgcgttcagctcacagagtttaacctttcttttcatagagcagttaggaaacactctgtttgtaaagtctgcaagtggatattcagacatctttgaggccttcgttggaaacgggatttcttcatattctgctagacagaagaattctcagaaacttccttgtgttgtgtgttttcaactcacagagttgaacgatgctttacacagagtagacttgaaacactctttttgtgtaatttgcaagtggagatttcagccgctttgaggtcaatgctagaaaaggaaatatcttcgtataaaaactagacagaatgattctcagaaactcctttgtgatgtgtgcgttcaactcacagagtttaacctttcttttcatagagcagttaggaaacactctgtaaagtctgcaagtggatattcagacctccttgaggccttcgttggaaacgggatttcttcatattttgctagacagaagaattcccagtaacttccttgtgttgtgtgcgttcaactcacagagttgaactttcatttacacagagcagatttgaaacactctttttgtggaatttgcaagtggagatttcaagcgctttgaggccaaaggcagaaaaggaaatatcttggtataaaaactagacagaatgattctcagaaactcctttgtgatgtgtgcgttcaactcatcagagtttaacttttcttttcattcagcagtttggaaacactctgtttgtaaagtctgcacgtggatattttgaccacttagaggccttcgttggaaacgggtttttttcatgtaaggctagacagaagaattcccagtaacttccttgtgttgtgtacattcaactcacagagttgaacgttcccttagacagagcagatttgaaacactctttttgtgcaattggcaaatggagatttcaagcgctttaaggtcaatggcagaaaaggaaatatcttcgtttcaaaactagacagaatcattcccacaaactgcgttgtgatgtgttcgttcaactcacagagtttaacctttcttttcatacagcagttaggaaacagtctgtttgtcaattctgtaagtggatattctgacatcttgtggccttcgttggaaacgggatttcttcatattctgctagacagaagaattctcagtaacttccttgtgttgtgtgtattcaactcacagagttgaatgatcctttacacagagcagacttgaaacactctttttgtggaatttgcaagtggagatttcagccgctttgaagtcaatggtagaaaagaaaatatcttcgtataaagactagacagaatgattctgagaaatcctttgtgatgtgtgcgttcaactcacagagtttaacctttcttttcatagagcagttaggaaacactctgtttgtaaagtctgcaagtggatattcagacctccttgaggccttcgttggaaacgggatttcttcatattatgctagacagaagaattctcagtaacttccttgtgttgtgtgtattcaactgacagagttgaactttcatttagagagagcaggtttgaaacactgtttttgtggaatttgcaagtggagatttcaagcgctttggggccaaaggcagaaaacgaaatatcttcgtttaaaaactagacagaatcattctcagaaactgctctgcgatgtgtgcgttcaactctcagagtttaacttttcttttcattcagcagtttggaaacactctgtttgtaaagtctgcaggtggatattttgaccacttagaggccttcgttggaaacgggtttttttcctgtaaggctagacagaagaattcccagtaacttccttgtgttgtgtgcattcaactcacagagttgaacgttcccttagacagagcagatttgaaacactctatttgtgcaatttgcaagtgtagatttcaagcgctttaaggtcaatggcagaaaaggaaatatcttcgttttaaaactagacagaatcattcccacaaactgcgttgtgacgtgttcgttcaactcacagagtttaacctttctgttcatagagcagttaggaaacactctgtttgtaaagtctgcaagtggatattcagacctccttgaggccttcgttggaaacgggatttcttcatattctgctagacagaataattctcagtaacttccttgtgttttgtgttttcaactcaccgagttgaaggatcctttacagagagcaggcttgaaacactctttttctcgaatttgcaagtggagattacagccgctttgaggtcaatggtagaaaaggaaatatcttcgtataaagactagacagaatgattctcagaaactcctttgtgatgtgtgcgttcaactcacagagtttaacctttcttttcatagagcagttaggaaacactctgtttgtgaagtctgcaagtggatattcagacatccttgaggctttcgttggaaacgggatttcttcatattctgctagaaagaagaattctcagtaacttccttgtgttgtgtgtattcaactgacagagttgaactttcatttagagtgagcagatttgaaacactgtttttgtggaatttgcaagtggagatttcaagcgctttggggccaaaggcagaaaaggaaatatcttcgtataaaaactagacagaatcattctcagaaactgctgcgtgatgtgtgcgttccactctcagagtttaacttttcttttcattcagcggtttggaaacactctgtttgtaaagtctgcacgtggatattttgaccacttagaggccttcgttggaaacgggttttttttcatgtaaggctagacagaagaattcccagtaacttccttgtgttgtgtgcattcaactcacagagatgaacattcccttagacagagcagatttgaaacactctatttgtgtaatttgcaagtgtagatttcaatcgctttaaggtcaatggcaaaaaaggaaatatctgcgtttcaaaactagacagactcattcccaaaaactgcgttgtgatgtgttcgttaaactcacagagtttaacctttctgttcatagagcagttaggaaacactctgtttgtgaagtctgtaagtggatattcagacctccttgaggccttcgttggaaacgggatttcttcatattctgctagacagaagaattctcagaatcttccttgtgttgtgtgtattcaactcacagagttgaacgatcctttacacagagcagacttgaaacactctttttgtggaatttgcaagtggagatttcaagcgctttgaggccaaaggcagaaaaggaaatatcttcgtttcaaaactagacagaatgattctcagaaactcctttgtgatgtgtgcgttcaactcacagagtttaacctttcttttcatagagcagttaggaaacactctgtttgtaaagtctgcaagtggatattcagacatccttgaggctttcgttggaaacgggatttcttcatattctgccagaaagaagaattcccagtaacttccttgtgttgtgtgtgttcaactcacagagttgaactttcatttacacagagcacatttgaaacactctttttgtggaatttgcaagtggagatttcaagcgctttgaggccaaaggcagaaaaggaaatatcttcgtataaaaactagacagaatcattctcagaaactgctctgcgatgtgtgcgttcaactctcagagtttaacttttcttttcattcagcagtttggaaacactctgtttgtaaagtctgcacgtggatattttgaccacttagaggccttcgttggaaaggggtttttttcctataaggctagccagaagaattcccagtaacttccttgtgttgtgtgcattcaactcacagagttgaacgttcccttagacagagcagatttgaaacactctatttgtgcaatttgcaagtgtagttttcaagctctttaaggtcaacggcagaaaaggaaatatcttggtttcaaaactagacagaatcatttccacaaactgcgttgtgatgtgttcgttcaactcacagagtttaacctttctgttcatagagcagttaggaaacactctgtttgtaaagtctgtaagtggatattctgacatcttgtggccttcgttggaaacgggatttcttcatattctgctagacagaagaattctcagtaacttccttgtgttgtgtgtattcaactcacagagttgaacgatcctttacacagagcggacttgaaacactcgttttgtggaatttgcaagtgcagatttcagccgcgttgaggtcaatggtagaaaaggaaatatcttcgtataaaaactagacagaatgattctcataaactcctttgtgatgtgtgcgttcaactcacagagtttaacctttcttttcatagagcagttaggaaacactctgtttgtaaagtctgcaagtggatattcagacctccttgagtccttcgttggaaacgggatttcttcatattctgctagacagaagaattctcagtaacttccttctgttgtgtgtattcaactgacagagttgaactttcatttagagagagcagatttgaaacactgtttttgtggaatttgcaagtggagatttcaagcgctttggggccaaaggcagaaaaggaaataacttcgtataaaaacttgacagaatcattctcagaaactgctgcgtgatgtgtgcgttcaactctcagagtttaacttttcttttcattcagcggtttggaaacactctgtttgtaaagtctgcacgtggatattttgaccacttagaggccttcgttggaaacgggtttttttcatgtagggctagacagaagaattcccagtaacttccttgtgttgtgtacattcaactcacagagttgaacgttcccttagagcagatttgaaacactctttttgtgcaattggcaagtggagatttcaagcgctttaaggtcaatggcagaaaaggaaatatcttcgtttcaaaactagacagaatcattcccacaaactgcgttgtgaggtgttcgttcaactcacagagtttaacctttcttttcatagagcagttaggaaacagtctgtttgtaaattctgtaagagtatattctgaaatattgtggccttcgttggaaacgggatttcttcatattctgctagacagaagaattctcagtaacttccttgtgttgtgtgtattcaactcacagagttgaacgatcctttccagagagcagacttgaaacactttttgtggaatttgcaagtggagatttctgtcgctttgaggtcaaaggtagaataggaaatatcttcctatagaaactagacagagtgattctcagaaactcctttgtgatgtctgcgttcaactcacagagtttaacctttcttttcatagagcagttaggaaacactctgtttgtaaagtctgcaagtggatattcagacctccttgaggccttcgttgtaaacgggatttctaaatattatgctagacagaagaattctcagtaaattccttgtgttgtgtgtattcaactgacagagttgaactttcatttggagagagcagatttgaaacactgtttttgtggaatttgcaagtggagatttcaagcgctttggggccaaaggcagaaaaggaaatatcttcgtataaaaactagacagaatcattctcagaaaatgctctgtgatgtgtgcgttcaactctcagagtttaacttttgttttcattcagcagtttggaaacactctgtttgtaaagtctgcacgtggatattttgaccacttagaggccttcgttggaaacgggtttttttcatgaaagggtagacagaagaattcccagtaacttccttgtgttgtgtgcattcaactcacagagttgaacgttcccttagacagaggagatttgaaacactctatttgtgcaatttgcaattgtagatttcaagcgctttaaggtcaatggcagaaaaggaaatatcttcgtttcaaaactagacagaatcattcccacaaactgcattgtgatgtgttcgttcaactcacagagtttaacctttcttttcatagagcagttaggaaacagtctgtttgtcaattctgtaagtggatattctgacatcttgtggccttcgttggaaacgggatttcttcatattccgctagacagaagaattctcagtaacttccttgtgttgtgtgtattcaactcacagagttgaacgatcctttacacagagcagacttgtaacactctttttgtggaatttgcaagtggagaattcagccgctttgaagtcaaaggtagaaaaggaaataacttcctataaaaactagacagaagaattcccagtaacttccttgtgttgtgtgtgttcaactcacagagttgaactttcatttacacagagtagatttgaaacactctttttgtggaatttgcaagtggagatttcaagcgctttgaggccaaaggcagaaaaggaaatatcttcgtataaaaactagacagaatcattctcagaaactgctgcgtgatgtgtgcgttaaactctcagagtttaacttttcttttcattcagcggtttggaaacactctgtttgtaaagtctgcacgtggatattttgaccacttagaggccttcgttggaaacgggtttttttcatgtaaggctagacagaagaattcccagtaacttccttgtgttgtgtgcattccactcacagagttgaacgttcccttagacagagcagatttgaaacactctatttgtgcaatttgcaagtgtagatttcaagcgctttaaggtcaatggcagaaaaggaaatatcttcgtttcaaaactagacagaatcattcccacaaactgcgttgtgatgtgttcgttcaactcacagagtttaacctttcttttcatagagcagttaggaaacagtctgtttgtaaattctctaagtggatattctgacatcttgtggccttcgttggaaacgggatttcttcatattctggtagacagaagaattctcagtaacttccttgtgttgtgtgtattcaactcacagagttgaatgatcctttacacagaacagacttgaaacactctttttgtggaatttgcaagtggagatttcagccgctttgaggtcaatggtagaataggaaatatcttcctatagaaactagacagaatgattctcagaaactcctttgtgatgtgtgcgttcaactcacagagtttaacctttctgttcatagagccgttaggaaacacactgtttgtaaagtctgcaagtggatattcagacctctttgaggccttcgttggaaacgggatttcttcatattatgctagacagaagaattctcagtaacttccttgtgttgtgtgtattcaactgacagagttgaactttcatttagagagagaagatttgaaacactgtttttgtggaatttgcaattggagatttcaagcgctttggggccaaatgcagaaaaggatatatcttcgtataaaaactagacagaatgattctcagaaacttctttgtgatgtgtgcgttcaactcacagagtttaaactttcttttcatagagtagttaggaatcactctgtttgtaaagtctgcaagtagatattttgacctctttgaggccttcgttggaaacgggtttttttccagtaaggctagacagaagaattcccagtaacttccttgtgttgtgtacattcaactcacagagttgaacgttcccttagacagagctgatttgaaacactctttttgtgcaattggcaagtggagatttctagcgctttaaggtcaatggcagaaaaggaaatatcttcgtttcaaaactagacagataatcattcccacaaactgcgttgtgatgtgttcgttcatctcacagagtttaacctttcttttcgtagagcagttaggaaacagtctgtttgtaaattctgtaagtggatattctgacatcttgtggccttcgttggaaacgggatttcttcatattctgctagacagaagaattctcagaatcttccttgtgttgtgtgtattcaactcacacagttgaacgatggtttacacagagcagatttgaaacactctttttgtggaatttgcaagtggagatttcagccgctttgaggtcaatggtagaaaaggaaatatcttcgtataaaaactagacagaatgattctcagaaactcctttgtgatgtgtgtgttcaactcacagagtttaacctttcttttcatagagcagttagtaaacactgtttataaagtctgcaagtggatattcagacccctttgaggccttcgttggaaacgggatttcttcatattatgctagacagaagaattcccagtaactttccttgtgttgtgtgtgttcaactcacagagttgaactttcatttacacagagcagatttgaaacactctttttgtggaatttgcaagtggagatttcaagcgctttgaggccaaaggcagaaaaggaaatagtcttcgtttcaaaactagacagaatcattctcagaaactgctctgcgatgtgtgcgttcaactctcaaagtttaacttttcttttcattcagcagtttggaaacactctgtttgtaaagtctgcacgtggataacttgaccacttagaggccttcgttggaaacaggtttttttcctgtaaggctagacagaataattcccagtaacttccttgtgttgtgtacattcaactcacagagttgaacgttcccttagagagagcagatttgaaacactcgttttgtgaaattggcaagtggagatttcaagggctttaaggtcaatggcagaaaaggaaatatcttcgtttcaaaactagacagaatcattcccacaaactgcgttgtgatgtgttcgttcaactcacagagtttaacctttcttttcatagagcagttaggaaacactctgtttgtaaattctgtaagtggatattctgacatcttgtggccttcgttggaaacgggatttcttcatattctgctagacagaagaattctcagtaactgccttgtgttgtgtgtattcaactcacagagttgaacgatcctttacacagagcagacttgaaacactctttttgtggaatttgcaagtggagatttcagccgctttgacgtcaatggtagaataggaaatatcttcctatagaaactagacagaatgattctcagaaactcctttgtggtgtgtgtgttcaactcacagagtttaacctttcttttcatagagcagttagtaaacactctgtttataaagtctgcaagtggatattcagacccctttgaggccttcgttggaaacgggatttcttcatattatgctagacagaagaattctcagtaacttccttgtgttgtgtgtattcaactgacagatttgaactttcatttagagagagtagatttgaaacactgtttttgtggaatttgcaagtggagatttcaagcgctttggggccaaaggcagaaaaggaaatatcttcgtataaaaactagacagaatcattctcagaaactgctgcgtgatgtgtgcgttcacctctcagagtttaacttttcttttcattcagcggtttggaaacactctgtctgtaaagtctgcacgtggatattttgaccacttagaggccttcgttggaaacgggtttttttcatgtaaggctagacagaagaattctcagtaacttccttgtgttgtgtgtattcaactcacacagttgaacgatcctttacacagagcagacttgtaacactccttttgtggaatttgcaagtggagatttcagccgctttgaagtcaaatgtagaaaaggaaatatcttcctataaaaactagacagaatgattctcagaaacccctttgtgatgtgtgcgttcaactcacagagtttaacctttctgttcatagagcagttaggaaacactctgtttgtaaagtctgtaagtggatattctgacatcttgtggccttcgttggaaaagggatttcttcctattctgctagacagaagaattctcagaatcttccttgtgttgtgtgtattcaactcacagagttgaacgatcctttacacagagcagacttgaaacactctttttgtggaatttgcaagtggagatttcagccgctttgaggtccatggtagaaaaggaaatatcttcgtacaaaaactagacagaaatgattctcagaaactcctttgtgatgtgtgtgttcaactcacagagtttcacctttcttttcatagagcagataggaaacactctgtttgtaaagtctgcaagtggatattcagacctctttgaggccttcgttggaaacgggtttttttcatataaggctagacagaagaattcccggtaacttccttgtgttttgtgtgttcaactcacagagttgaactttcatttacacagagcagatttgaaacactctttttgtggaatttgcaagtggagatttcaagcgctttgaggccaaaggcagaaaaggaaatatcttcgtttcaaaactagacagaatcattctcagaaactgctctgcgatgtgtgcgttcaactctcagagtttaacttttctattcattcagcagtttggaaacactctgtttgtaaagtctgcacgtggatattttgaccacttagaggccttcgttggaaacgggtttctttcctgtaaggctagacagaagaattcccagtaacttccttgtgttgtgtacattcaactcacagagttgaacgttcccttagacagagcagatttgaaacactctttttgtgcaattggcaagtggtgatttcagccgctttgaggtcaatggtagaaaaggaaatatcttcgtataaaaactagacagaatgattctcagaaactcctttgtgatgtgtgcgttcaactcacagagtttaacctttcttttcatagagcagttaggaaacactctgtttgtaaagtctgcaaatggatattcagacctccttgaggccttcgttggaaacgggatttcttcatattatgctagacagaagaattctcagtaacttccttgtgttgtctgtattcaactcacagagttcaacgattctttacacagagcagacttgaaacagtctttttgtggaatttgcaagtggagatttcagccgctttgaggtcaattgtagaaaaggaaatatcttcgtataaaaactggacagaatgattctcataaactcctttgtgatgtgtgcgttcaactcacagagtttaacctttcttttcatagagcagttagtaaacactctgtttataaagtctgcaagtggatattcagacccctttgaggccttcgttggaaacgggatttcttcatattatgctagacagaagaattctcagtaacttccttgtgttgtgtgtattcaactgacagagttgaactttcatttagaaagagcagatttgaaacactgtttttgtggaatttgcaagtggagatttcaagcgctttggggccaaaggcagaaaaggaaatatcttcgtataaaaactagacagaatcattctcagaaactgctgcgtgatgtgtgcgttcaactctcaagagtttaacttttcttttcattcagcggtttggaaacactctgtttgtaaagtctgcacgtggatattttgaccacttagaggccttcgttggaaacgggtttttttcatgtaaggctagacagaagaattcccagtaacttccttgtgttgtgtacattcaactcacagagttgaacgttcccttagacagagcagatttgaaacactctttttgtgcaattggcaaatggagatttcaagcgctttaaggtcaatggcagaaaaggaaatatcttcgtttcaaaactagacagaatgattctcagaaactcctttgtgatgtgtgggttcaactcacagagtttaacctttcttttcatagagcagttaggaaacactctgtttgtaaagtctgcaagtggatattcagacatccttgaggctttcgttggaaacgggatttcttcatattctgctagaaagaagaattctcagtaacttccttgtgttgtgtgtattcaactcacagagttgaacgatcctttacacagagcagacttgaaacactctttttgtggaatttgcaagtggatatttcagccgctttgagttcaatggtagaataggaaatatcttcctatagaaactagacagaatgattctcagaaactcctttgtgatgtgtgtgttcaactcacagagtttaacctttcttttcatagagcagttagtaaacactctgtttataaagtctgcaagtggatattcagacccatttgaggccttcgttggaaacgggatttcttcatattatgctagacagaagaattcccagtaacttcccttgtgttgtgtgtgttcaactcacagagttgaactttcatttacacagagcagatttgaaacactctttttgtgcaatttgcaagtggagatttcaagcgctttgaggccaaaggcagaaaaggaaatatcttcgtttcaaaactagacagaatcattctcagaaactgctgcgtgatgtgtgcgttcaactctcagagtttaacttttcttttcattcagcggtttggaaacactctgtttgtaaagtctgcacgtggatattttgacgacttagaggccttcgttggaaacgggtttttttcatgtaaggctagacagaagaattcccagtaacttccttgtgttgggtgcattcaactcacagagttgaacgttcccttagacagagcagatttgaaacactctatttgtgcaatttgcaagtgtagatttcaagcgctttaaggtcaatggaagaaaaggaaatatcttcgtttcaaaactagacagaatcattcccacaaactgcgttgtgatgtgttcgttcaactcacagagtttaacctttctgttcatagagcagttaggaaacactctgtttttaaagtctgtaagtggatattctgacatcttgtggccatcgttggaaacgggatttcttcatattctgctagacagaagaattctcagtaacttccttgtgttgtgtgtattcaactcacagagttgaacgatcctttacacagagcagacttgaaacactcgttttgtggaatttgcaagtggagatttcagctgctttgaggtcaatggtagaaaaggaaatatcttcgtataaaaactagacagaatgattctcagaaactcctttgtgatgtaagcgttcaactcacagagtttaacctttctttacatagagcagttaggaaacactctgtttgtaaagtctgcaagtggatattcagacctccttgaggccttcgttggaaacgggatttcttcatattatgctagacagaagaattccgagtaacttccttgtgttgtgtgtgttcaactcacagagttgaactttcatttacacagagcagatttgaaacactctttttgtggaatttgcaagtggagatttcaagcgctttgaggccaaaggcagaaaaggaaatatcttcgtataaaaactagacagaatcactctcagaaactgctctgcgatgtgtgcgttcaactctcagagtttaacttttcttttcattcagcagtttggaaacactctgtttgtaaagtctgcacgtggataacttgaccacttagaggccttcgttggaaacgggtttttttcctgtaaggctagacagaagaattcccagtaacttccttgtgttgtgtacattcaactcacagagttgaacgttcccttagacagagcagatttgaaacactctttttgtgcaattggcaaatggagatttcaagcgctttaaggtcaatggcagaaaaggaaatatcttcgtttcaaaactagacagaatcattcccacaaactgcgttgtgatgtgtacgttcaactcacagagtttaacctttctgttcatagagcagttaggaaacacgctgtttgtaaagtctgtaagtggatattctgacatcttgtggccttcgttggaaacgggatttcttcatattctgctagacagaagaattctcagtaccttccttgtgttgtgtgtattcaactcacagagttgaacgatcctttacacagagcagacttgtaacactctttttgtggaatttgcaagtggagatttcagccgctttgaagtcaaaggtagaaaaggaaatatcttcctataaaaactagacagaatgattctgagaaactcgtttgtgatgtgtgcgttcaactcacagagtttaacctttcttttcatagagcagttaggaaacactctgtttgtaaagtctgcaagtggatattcagacctccttgaggccttcgttggaaacgggatttcttcatattatgctagacaaaagaattctcagtaacttccttgtgttgtgtgtattcaactgaaagagttgaactttcatttagagagagcagatttgaaacactgtttttatggaatttgcaagtggagatttcaagcgctttggggccaaaggcagaaaaggaaatatcttcgtataaaaactagacagaatcattctcagaaactgctgcgtgatgtgtgcgttcaactctcagagtttaacttttcttttcattcagcggtttggaaacactctgtttgtaaagactgcaggtggatattttgaccacttagaggccttcgttggaaacgggttttttttcatgtaaggctagacagaagaattcccagtaacttccttgtgttgtgtgcattcaactcacagagttgaacgttcccttagacagagcagatttgaaacactctatttgtgcaatttgcaagtgtagatttcaagcgctttaaggtcaatggcagaaaaggaaatatcttcgtttcaaaactagacagaatcattcccacaaactgcgttgtgatgtgttcgttcaactcacagagtttaacctttccgttcatagagcagttaggaaacactctctaaagtctgtaagtggatattcagacctccttgaggtcttcgttggaaacgggatttcttcatattctgctagacagaagaattctcagtaacttccttgtgttgtgtgtattcaactcacagagttgaacgatcctttacacagagcagacttgaaacactctttttgtggaatttgcaagtggagatttcagccgctttgaggtcaatggtagaaaagaaaatatcttcgtataaagactagacagaatgattctcagaaactcctttgtgatgtgtgcgttgaactcacacagtttaacctttcttttcatagagcagttaggaaacactctgtttgtaaagtctgcaagtggatattcagacctccttgaggccttcgttggaaacgggatttcttcatattatgctagacagaagaaatcccagtaacttccttgtgttgtgtgtgttcaactcacagagttgaactttcatttacacagagcagatttgaaacactctttttgtggaatttgcaagtggagatttcaagcgctgtgaggccaaaggcagaaaaggaaatatcttcgtataaaaactagacagaatcattctcagaaactgctctgcgatgtgtgcgttcaactctcagagtttaacttttcttttcattcagcagtttggaaacactctgtttgtaaagtctgcacgtggatatttcgaccacttagaggccttcgttggaaacgggtttctttcctgtaaggctagacagaagaattcccagtaacttccttgtgttgtgtacattcaactcacagagttgaacgttcccttagacagagcagatttgaaacactctttttgtgcaattggcaagtggagatttcaagcgctttgaggtcaatggcagaaaaggaaatatcttcgtttcaaactagacagaatcattcccacaaactgcgttgtgatgtgttcgttcaactcacagagtttaacctttcttttcatagatcagttaggaaacagtctgtttgtcaattctgtaagtggatattctgacatcttgtggccttcgttggaaacgggatttcttcatattctgctagacagaataattctcagtaacttccttgtgttgtgtgcattcaactcacagagttgaacgatcctttacagagagcagagttgaaacactttttgtggaatttgcaagtggagatttcagccgctttgaggtcaaaagtagaataggaaatatcttcctatagaaactagacagaatgattctcagaaactcctttgtgatgtgtgtgttcaactcacagagtttaacctttcttttcatagagcagttagtaaacactctgtttatatagtctgtaagtggatattctgacattttgtggccttggttggaaatgggatttcttcatattctccaagacagaagaattcccagtaacttccttgtgttgtgtgtgttcaactctgtgagttgaactttcatttacacagagcagatttgaaacactctttttgtggaatttgcaagtggagatttcaagcgctttgaggccaaaggcagaaaaggaaatatcttcgtataaaaactagacagaatcattctcagaaactgctgcgtgatgtgtgcgttcaactctcagagtttaacttttcttttcattcagcggtttggaaacactctgtttgtaaagtctgcacgtggatattttgaccacttagaggccttagttggaaacgggttttttgcatgtaaggctagacagaagaattcccagtaacttcattgtgttgtgtgaattcaactcacagagttgaacgttcccttagacagagcagatttgaaacactctatttgtgcaatttgcaagtgtagatttcaagcgctttaaggtcaatggcagaaaaggaaatatcttcgtttcaaaactagacagaatcattcccacaaactgcgttgtgatgtgttcgttcaactcacagagtttaacctttctgttcatagagcagttaggaaacactctgtttgtaaagtctgcaagtgggtattcagacctccttgaggccttcgttggaaacgggatttcttcatattctgctagacagaagaactctcagtaacttccttgtgttgtgtgtattcaactcacagagttgaacgatcctttacacagagcagacttgaaacactctatttgtggaatttgcaagtggagatttcagccgctttgagttcaatggtagaataggaaatatcttcctatagaaactagacagaatgattctcagaaactcctttgtgatatgtgcgttcaactcacagagttaaacctttcttttcatagagcagttgggaaacactctgtttgtaaagtctgcaagtggatattcagacttctttgaggccttcgttggaagcgggatttcttcatattctgctagacagaagaattctcagtaacttccttgtgttgtgtgtattcaactcacagagttgaacgatcctttacacagagcggacttgaaacacactttttgaggaatttgcaagtggagatttcagccgcgttgaggtcaatggtagaaaaggaaatatcttcgtataaaaactagacagaatcattctcagaaactgctgcgtgatgtgtgcgttcaactctcagagtttaacttttcttgtcattcagcggtttggaaacactctgtttgtaaagtctgcacgtggatattttgaccacttagtggccttcgttggaaacgggttttttttcatgtaaggctagacagaagatttcccagtaaattccttgtgttgtgtacattcaactcacagagttgaacgttcccttagacagagcagatttgaaacactctttttgtgcaattggcaagtggagatttcaagcgctttaaggtcaatggcagaaaaggaaatatcttcgtttcaaaactagacagaatcattcccacaaactgcgttgtgatgtgtttgttcaactcacagagtttaacctttctgttcatagagcagttaggaaacactctgtttgtaaagtctgcaagtggatattcagacctccttgaggccttcgttggaaacgggatttcttcatattctgctagacagaagaattctcagaatcttcccttgtgttgtgtgtattcaactcacagagttgaacgatcctttacacagagcagacttgaaacactctttttgtggaatttgcaagtggagatttcagccgctttgaggtccatggtagaaaaggaaatatcttcgtataaaaactagacagaatgattctcagaaactcctttgtgatgtgtgcgttcaactcacagagtttaacctttcttttcatagagcagttaggaaacactctgtttgtaaagtctgcaagtggatattcagacctctttgaggccttcgttggaaacgggttttttacatataaggcttgacagaagaattcccagtaacttccttgtgttgtgtgtgttcaactgacagagttgaactttcatttacacagagcagatttgaaacactctttttgtggaatttgcaagtggagatttcaagcgctttgaggccaaaggcagaaaaggaaatatcttcgcataaaaactagacagaatcattctcagaaaatcctctgtgatgtgtgcgttcaactctcagagtttaacatttcttttcattcagcagtttgaaaacactctgtttgtaaagtctgcacgtggatattttgaccacttagaggccttcgttggaaacgggtttttttcatgtaagtgtagacagaagaattcccagtaacttccttgtgttgtgtgcattcaactcacagagttgaacgttcccttagacagagcagatttgaaacagtctatttgtgtaatttgcaagtgtagatttcaagcgctttcaggtcaacggcagaaaaggaaatatcttcgtttcaaaactagacagaatcattcccacaaactgcgttgtgatgggttcgttcaactcacagagtttaacctttcttttcatagagcagttaggaaacagtctgtttgtcaattctgtaagtggatattctgacatcttgtggccttcgttggaaacgggatttcttcatattctgctagacagaagaattctcagtgacttccttgtgttgtgtgtattctactcacagagttgaacgatcctttacacagagcagacttgaaacactctttttgtggaatttgaaagtggagatttcagccgctttgaggtcaatggtagaaaaggaaatatcttcgtataaagactagacagaatgattctcataaactcctttgtgatgtgtgcgttcaactcacagagtttaacttttcttttcatagagcagttaggaaacactctgtttgtaaagtctgcaagtggatattcagacctctttgaggccttcgttggaaacgggatttcttcatattatgctagacagaagaattcccagtaacttccttgagttgtgtgtgttcaactcacagagttgaacattcatttacccagagcagatttgaaacactctttttgtggaatttgcaagtggagatttcaagcgctttgaggccaaaggcagaaaaggaaatatcttcgtttcaaaactagacagaatcattctcagaatctgctctgcgatgtgtgcgttcaactctcagagtttaacttttcttttcattcagcagtttggaaacactctgtttgtaaagtctgcacgtggatattttgaccacttagaggccttcgttggaaacgggtttttttcctgtaaggctagacagaagaattcccagtaacttccttgtgttgtgtacggttcaactcacagagttgaacgttcccttagacagagcagatttgaaacactctttttgtgcaattggcaagtggagatttcaagcgctttaaggtcaatggcagaaaaggaaatatcttcgtttcaaaactagacagaatcattcccacaaactgtgttgtgatgtgttcgttcaactcacagagtttaacctttctgttcatagagcagttaggaaacactctgtttgtaaagtctgtaagtggatattctgacatcttgtggccttcgttggaaacgggatttcttcatattctgctagacagaagaattctcagtaacttccttgtgttgtgtgtattcaactcacagagttgaacgatcctttacacagagcagacttgaaacactctttttgtggaatttgcaagtggagatttcagccgctttgaggtcaatagtagaaaaggaaactatcttcatataaagactagacagaatgattctcagaaactcctttgtgatgtgtgcgttcaactcacagagtttaacttttcttttcatagagcagttaggaaacactctgtttgtaacgtctgcaagtggatattcagacctctttgaggccttcgttggaaacgggatttcttcatattatgctagacagaagaattctcagtaacttccttgtgttgtgtgtattcaactcacagagttgaacgatcctttacacgagagcagagcttgaaacactctttttgtggaatttgcaagtggagatttcatgccgctttgaggtcagtggtagaaaaggaaatatcttcgtataaagactagacagaatcattctcagaaactgctctgcgatgtgtgcgttcaactctcagagtttaactttgcttttcattcagcagtttggaaacactctgtttgtaaagtctgcacgtggatattttgaccacttagaggccttcgttggaaacgggtttctttcctgtaaggctagacagaagaattcccagtaacttccttgtgttgtgtacattcaactcacagagttgaacgttcccttagacagagcagatttgaaacactctttttgtgcaattggcaagtggtgattttagccgctttgaggtcaatggtataaaaggaaatatcttcgtattaaaactagacagaatcattcccacaaactgcgttgtgaggtgttcggtaaactcacagagtttaacctttcttttcatagagcagttaggaaacagtctgtttgtaaattctgtaagtggatattctgacatcttgtggccttcgttggaaacgggatttcttcatattctgctatacagaataattctcagtaacttccttgtgttgtgtgtattcaactcacagagttgaacgatcctttacagagagcagacttgaaacactctttttgtggaatttgcaagtggagatttcagccgctttgaggtcaaaggtagaataggaaatatgcttcctacagaaaatagacagaatgattctcataaactcctttgtgatgtgtgcgttcaacacacagagtttaacctttctgttcatagagcagttaggaaacactctgtttgtaaagtctgtaagtgcatattctgacatcttgaggccttcgttggaaacgggatttcttcatattctgctagacagaagaattcccagtaacttccttgtgttgtgtgtgttcaactcacagagttgaactttcatttacacagagcagatttgaaacactctttttgtggaatttgcaagtggagatttcaagcgctttgaggccacaggcagaaaaggaaatatcttcgtttcaaaactagacagaatcattctcagaaactgctgcgtgatgtgtgcgttcaactctcagagtttaacttttctagtcattcagcggtttggaaacactctgtttgtaaagtctgcacgtggatattttgaccacttagaggccttcgttggaaacgggattttttcatgtaaggctagacagaagaattctcagtaacttccttgtgttgtgtgtattcaactcacagagttgaacgaatcctttacagagagcagacttgaaacactctttttgtggaatttgcaagtggagatttcagccgctttgaggtcaatggtagaataggaaatatcttcctatagaaaatagacagaatgattctcagaaactcctttgtgatgtgtgcgttcacctcacagagattaacctttcttttcatagagcagttaggaaacactctgtttgtaaagtctgcaagtggatattcagacctctttgaggccttcgttggaaacgggatttcttcatattctgctacacagaagaattctcagtaacttccttgtgttgtgtgtattcaactcacagagttgaacgatcctttacacagagcagtcttgaaacactctttttgtggaatttgcaagtggagatttcagccgctttgaggtcaatagtagaaaaggaaatatcttcgtagaaaaactagacagaatgattctcagaaactcctttgtgatgtgtgcgttcaactcacagagtttaacctttcttttcatagagcagttaggaaacactctgtttgtaaagtctctaagtggatattcagacctctttgaggccttcgttggaaacgggtttttttcatataaggctagacagaagaattcccagtaacttccatgtgttgtgtgtgttcaactcacagagttgaactttcatttacacagagcagatttgaaacactctttttgtggaatttgcaaatggagatttcaagcgctttgaggccaaaggcagaaaaggaaatatcttcgtataaaaactagacagaatcattctcagaaactgctatgcgatgtgtgcgttcaactctctgagtttaacttttcttttcattcagcagtttggaaacactctgtttgtaaagtctgcacgtggataatttgaccacttagaggtcttcgttggaaacgggtttttttcatgtaagggtagacagaagaattcccagtaacttccttgtgttttgtgcattcaactcacagagttgaacgttcccttagacagagcagatttgaaacactctatttgtgcaatttgcaagtgtagatttcaagcgctttaaggtcaatggcagaaaaggaaatatcttcgtttcaaaactagacagaatcattcccacaaactgtgttgtgatgtgttcgttcatctcacagagtttaacctttcttttcatagagcagttaggaaacactatgtttgtaaattctgtaagtggatattctgacatcttgtggccttcgttggaaacgggatttcttcatattctgctagacagaagaattctcagtaacttccttgtgttgtgtgtattcaactcacagagttgaacgatcctttacagagagcagacttgaaacactctttttgtggaatttgcaagtggagatttcaggggttttgaggtcaatggtagaaaaggaaatatcttcgtataaagactagacagaatgattctcagaaactcctttgtgatgtgtgcgttcaactcaaagagtttaacttttcttttcatagagcagttaggaaacactctgtttgtaaagtctgcaagtggatattcagacctctttgaagccttcgttggaaacgggatttcttcatattatgctagacagaagaattcccagtaacttccttgtgttgtgtgtgttcaactcacagagttgaactttcatttacacagagcagatttgaaacactctttttgtggaatttgcaaatggagatttcaagcgctttgaggccaaaggcagaaaaggaaatatctttgtataaaaactagacagaatcattctcagaaactgctctgcgatgtgtgcgttcaactctcaaagtttaactttgcttttcattcagcagtttggaaacactctgtttgtaaagtctgcacgtggataatttgaccacttagaggccttcgttggaaacgggtttttttcatgtaaggctagacagaagaattcccagtaacttccttgcgttgtgtacattcaactcacagagttgaacgttcccttagacagagcagatttgaaacactctttttgtgcaattggcaagtggagatttcaagcgctttaaggtcaatggcagaaaaggaaatatcttcgtttcaaaactagacagaatgattctcataaactcctttgtgatgtgtgcgttcaactcacagagtttaacctttcttgtcatagagcagttaggaaacactctgtttgaaaagtctgcaagtggatattcagacctccttgaggccttcgttggaaacgggatttcttcatattctgctagacagaagaattctcagtaacttccttgtgttgtgtgtattcaactcacagagttgaacgatcctttacacagagcagacttgaaacactctttttggggaatttgcaagtggagatttcagccgctttgaggtcaatggtagaaaaggaaatatcttcgtataaagactagacagaatgattctcagaaactcctttgtgatgtgtgcgttcaactcacagagtttaacttgtcttttcatagagcagttaggaaacactctgtaaagtctgcaagtggatattcagacctctttgaggccttcgttggaaacgggatttcttcatattatgctagacagaagaattctcagtaacttccttgtgttgtgtgtattcaactgacagagttgaaccttcatttagagagagcagatttgaaacactgtttttgtggaatttgcaagtggagatttcaagcgctttggggccaaaggcagaaaaggaaatatcttcgtataaaaactagacagaatcattctcagaaactgctctgcgatgtgtgcgttcaactctcagagtttaacttttcttttcattcagcagtttggaaacactctgtttgtaaagtctgcacgtggatattttgacctcttagaggccttcgttggaaacgggtttttttcctgtaaggctagacaagaagaattgccagtaacttccttgtgttgtgtgcattcaactcacagagttgaacgttcccttagacagagcagatatgaaacactctatttgtgcaatttgcaagtgtagatttcaagcgctttaaggtcaatggcagaaaaggaaatatcttcgtttcaaaactagacagaatcattctcagaaactgctctgcgatgtgtgcgttcaactctcagagtttaacttctcttttcattcagtagtttggaaacactctgtttgtaaagtctgcacgtggataacttgaccacttagaggccttcgttggaaacgagtttttttcatgtaaggctagacagaagaattctcagtaacttccttgtgttgtgtgtattcatctcacagagttgaacgatcctttacacagagcagacttgtaaaactctttttgtggaatttgcaagtggagatttcagccgctttgaagtcaaaggtagaaaaggaaatatcttcctataaaaactagacagaatgattctcagaaactcctttgtgatgtgtgtgttcaactcacagagtttaacctttcttttcatagagcagttaggaaacactctgtttgtaaagtctgcaagtggatattctgacctctttgaggccttcttcggaaacgggtttttttcatataaggctagacagaagaattcccagtaacttccttgtgttgtgtgtgttcaactgacagagttgaactttcatttacacagagcagatttgaaacactctttttgtggaatttgcaggtggagatttcaagcgctttgaggccaaaggcagaaaaggaaatatcttcgtataaaaactagacagaatcattctcagaaactgctgcgtgatgtgtgcgttcaactctcagagtttaacttttcttttcattcagcggtttggaaacactctctttgtaaagtctgcacgtggatattttgaccacttagaggccttcgttggaaacgggtttttttcatgtaaggctagacagaagaattcccagtaacttccttgtgttgtgtacattcaactcacagagttgaacgttcccttagacagagcagatttgaaacactctttttgtgcaattggcaaatggagatttcaagcgctttaaggtcaatggcagaaaaggaaatattcttcgtttcaaaactagacagaatgattctcataaactcctttgtgatgtgtgcgttcaacacacagagtttaacctttctgttcatagagctgttaggaaacactctgtttgtaaagtctgtaagtggatattctgacatcttttggccttcgttggaaacgggatttcttcatattctgctagacagaagaattctcagtaacttccttgtgttgtgtgtattcaactcacagagttgaacgatcctttacacagagcagacttgtaacactctttttgtggaatttgcaagtggagatttcagccgctttgaggtcaaaggtagaaaaggaaatatcttcctataaaaactagacagaatgattctcagaaactcctttgtgatgtgtgcgttcaactcacagagtttaacctttcttttcatagagcagttaggaaacactctgtttgtaaagtctgcaagtggatattcagacctccttgaggccttcgttggaaatgggatttcttcatattctgctagacagaagaattcccagtaacttccttgtgttgtgtgtgttcaactcacagagttgaactttcatttacacagagcagatttgaaacactctttttgtggaatttgcaagtggagatttcaagcgctttgaggccaaaggcagaaaaggaaatatgttcgtttcaaaactagacagaatcattctcagaaactgctctgcgatgtgtgcgttcaactctcagagtttaacttttcttttcattcagcagtttggaaacactgtgtttgtaaagtctgcacgtggatattttgaccacttagaggccttcgttggaaacgggttttttttcctgtaaggctagagagaagaattcccagtaacttccttgtgttgtgtgcattcaactcacagagttgaacgttcccttagacagagcagatttgaaacactctatttgtgcaatttgcaagtgtagatttcaagcgctttaaggtcaatggcagaaaaggaaatatcttcgtttcaaaactagacagaatcattcccacaaactgcgttgtgacgtgttcgttcaactcacagagtttaacctttctgttcatagagcagttaggaaacactctgtttgtaaagtctgtaagtggatattctgacatcttgtggccttcgttggaaacaggatttcttcgaattctgctagacagaagaattctcagtaacttccttgtgttgtgtgtattcaactcacagagttgaacgatcctttacacagagcagatttgtaacactctttttgtggaatttgcaagtggagatttcagccgctttgaagtcaaaggtagaaaaggaaataacttcctataaaaactagacagaatgattctcagaaactcctttgtgatgtgtacgttcaactcacagagtttaacctttcttttcatagagcagttaggaaacactctgtttgtaaagtctgcaagtggatattgagacctctttgaggccttcgttggaaacgggtttttttcatgtaaggctagacagaagaattctcagtaacttccttgtgttgtgtgtattcaactgacagagttgaactttcatttagagagagcagatttgaaaccctgttttgtggaatttgcaagtggagatttcaagcgctttggggccaaaggcagaaaaggaaatatcttcgtataaaaactagacagaatgattctcagaaactgctctgcgatgtgtgcgttcacctctcagagtttaacttttcttttcattcagcagtttggaaaccctctgtttgtaaagtctgcacgtgcataatttgaccacttagaggccttcgttggcaacgggtttttttcatgtaaggctagacagaagaattcccagtaacttcccttgtgttgtgtacatttaactcacagagttgaacgttcccttagacagagcagatttgaaacactctttttgtgcaattggcaagtggagatttcaagcgctttaaggtcaatggcagaaaaggaaatatcttattttcaaaactagacagaacgattctcagaaactcctttgtgatgtgtgcgttcaactcacagagtttaacctttcttttcatagagcagttaggaaactgtctgtttgtaaagtctgcaagtggatattcagacctctttgaggccttcgttggaaacgggatttcttcatattctgctagacagaagaattctcagtaacttccttgtgttgtgtgtattgaactcgcagagttgaacgatcctttacagagagcagacttgaaacactctttttgtggaatttgcaagtggagatttcagccgctttgaggtcaatggtagaaaaggaaatatcttcgtataaagactagacagaatgattctcagaaactcctttgtgatgtgtgcgttcaacacacagagtttaacttttcttttcatagagaagttagtaaacactctgtttataaagtctgcaagtggatattcagacccctttgaggccttcgttggaaacgggatttcttcatattatgctagacagaagaattccaagtaacttccttgtgttgtgtgtgtccaactcacagagttgaactttcatttacacagagcagatttgaaacactctttttgtggaatttgcaaatggagatttcaagcgctttgaggccaaaggcagaaaaggaaatatcttcgtataaaaaccagacagaatcattctcagaaactgctcgtgcgatgtgtgcgttcgactctcagagtttaacttttcttttcattcagcagtttggaaacactctgtttgtaaagtctgcacgtggataatttgaccacttagaggccttcgttggaaacgggtttttttcatgtaaggctagacagaagaattcccagtaacttccttgtgttgtgtacattcaactcacagagttgaaccgttcccttagacagagcagatttgaaacactctttttgtgcaattggcaagtggagatttcaagcgctttaaggtcaatggcagaaaaggaaatatcttcgtttcaaaactaggcagaatgattctcagaaactcctttgtgatgtgtgcgttcaactcacagagtttaacctttcttttcatagagcagttaggaaacgctctgtttgtaaagtctgcaagtggatattcagacatccttgaggctttcgttggaaacgggatttcttcatattctgctagaaagaagaattctcagtaacttccttgtgttgtgtgcattcaactcacagagttgaacgatcctttacacagagcagacttgaaacactctttttgtggaatttgcaagtggagatttcagccgctttgaggtcaatggtagaaaaggatactatcttcgtataaagactagacagaatgattctcagaaactcctttgtgatgtgtgcgttcaactcacagagtttaacctttcttttcatagagcagttaggaaacactctgtttgtaaagtctgcaagtggatattcagacatctttgaggctttcgttggaaacgggatttcttcatattctgctagacagaagaattctcagtaacttccttctgttgtgtgtattcaactcacagagttgaacgatcctttacacagagcagacttgaaacactctttttgtggaatttgcaagtggagatttcagccgctttgaggtcaatggtagaataggaaatatcttcctatagaaactagacagaatcattctcagaaactgctctgcgatgtgtgcgttcaactctcagagtttaacttttcttttcattcagcagtttggaaacactctgtttgtaaattctgcacgtggataacttgaccacttagaggccttcgttggaaacgggtttttttcctgtaaggctagacagaagaattcccagtaacttccttgtgttgtgtacattcaactcacagagttgaacgttcccttagacagagcagatttgaaacactctttttgtgcaattggcaaatggagatttcaagcgctttaaggtcaatggcagaaaaggaaatatcttcgtttcaaaactagacagaatcattcccacaaactgcgttgtgatgtgttcgttcaactcacagagtttaacctttctgttcatagagcagttaggaaacactgtgtttgtaaagtctgtaagtggatattctgacatcttgtggccttcgttggaaacgggatttcttcattttctgctagacagaagaattctcagtaacttccttgtgttgtgtttattcaactcacagagttgaacgatcctatacacagagcagacttgaaacactctttttgtggaatttgcaagtggagatttcagccgctttgaggtcaatggtagaataggaaatatcttcctatagaaactagacagagtgattctcagaaactcctttgggatgtctgcgttcaactcacagagtttaacctttcttttcatagagcagttaggaaacactctgtttgtaaagtctgcaagtggatattcagacctccttgaggccttcgttggaaacgggatttcttcatattctgctatacagaagaattctcagaaacttccttgtgttgtgtgtattcaactcacagagttgaacgatcgtttacacagagcagacttgagacactctttttgtggaatttgtaagtggagatttcagccgctttgaggtcaatggtagaaaaggaaatatcttcatataaagactagacagaatcattctcagaaactgctctgcgatgtgtgcgttcaactctcagagtttaacttttcttttcattcagcagtttggaaacactctggttgtaaagtctgcacgtggataacttgaccacttagaggccttcgttggaaacgggtttttttcctgtaaggctagacagaagaattcccagtaacttccttgtgttgtgtacattcaactcacagagttgaacgttcccttagacagagcagatttgaaacactctttttgtgcaattggcaagtggagatttcaagcgctttgaggtcaatggcagaaaaggaaatatcttcgtttcaaaactagacagaatgattctcagaaactcctttgtgatgtgtgagttcaactcacagagtttatcctttcttttcatagagcagttaggaaacactctgtttgtaaagtgtgcaagtggatattcagacctctttgaggccttcgttggaaacgggatttcttcatattctgctagacagaagaattctcagtaacttccttgtgttgtgtgcattgaactcacagagttgaacgatcctttacacagggcagacttgaaacactctttttgtggaatttgcaagcggagatttcagcctctttgaggttaatggtagaaattgaaatatcttcgtatagaaactagacaaaatgattctcagaaactcctttgtgatgtgtgcgttcaactcacagagtttaacttttcttttcatagagcagttaggaaacactctgtttgtaaagtctgcaagtggatattcagacctctttgaggccttcgttggaaacgggattcttcatattatgctagacagaagtattctcagtaacttccttgtgttgtgtgtattcaactgacagagttgaactttcatttagagagagcagatttgaaacactgtttttgtggaatttgcaagtggagatttcaagcgctttggggccaaaggcagaaaaagaaatatcttcgtataaaaactagacagaatcattctcagaaactgctctgcgatgtgtgcgttcaactctcagagtttaacttttcttttcattcagcagtttggaaacactctgtttgtaaagtctgcacgtggatattttgagcacttagaggccttcgttggaaacgggtttttttcctgtaaggctagacagaagaattcccagtaacttccttgtgttgtgtacattcaactcacagagttgaacgttcccttagacagagcagatttgaaacactctttttgtgcaattggcaaatggagatttcaagcgctttaaggtcaatggcagaaaaggaaatatcttcgtttcaaaactagacagaatcattcccacaaactgcgttgtgatgtgttcgttcaactcacagagtttaacctttcttttcatagagcagttaggaaacagtctgtttgtcaattctgtaagtggatattctgacatcttgtggccttcgttggaaacgggatattcttcatattctgctagacagaagaattctcagtaacttccttgtgttgtgtgtattcaactcacagagttgaacgatcctttacacagagcagacttgaaacactctttttgtggaatttgcaagtggagatttcaggcgctttgaggtcaatagtagaaaaggaaatatcttcgtagaaaaactagacagaatgattctcagaaactcctttgtgatgtgtgtgttcaactcacagagtttaacctttcttttcatagagcagttagtaaacactctgtttataacgtctgcaagtggatattcagacccctttgaggccttcgttggaaacgggatttcttcatattatgctagacagaagaattctcagtaacttccttgtgttgtgtgtattcaactgacagagttgaactttcttttagagagagcagatttgaaacactgtttttgtggaatttgcaagtggagatttcaagcgctttggggccaaaggcagaaaaggaaatatcttcgtataaaaactagacagaatcattctcagaaactgctctgcgatgtgtgcgttcaactctcagagtttaacttttcttttcattcagcagtttggaaacactctgtaaactctgcatgtggatattttgaccacttagaggccttcgttggaaacgggtttttttcctgtaaggctagacagaagaattcccagtaacttccttgtgttgtgtacattcaactcacagagttgaacgttcccttagacagagcagatttgaaacactctttttgtgcaattggcaagtggtgatttcagccgctttgaggtcaatggtagaaaaggaaatatcttcgtataaaaactagacagaatgattctcagaaacttcattgtgatgtgtgcgttcaactcacagagtttaacctttcttttcatacagcagttaggaaacactctgtttgtaaactctgcaagtcgatattcacacctctttgaggccttcgttggaaacgggatttcttcatactatgctagacagaagaattctcagtaacttccttgtgttgtgtgtattcaactcacagagttgaacgatcctttacacagagcagacttgtaacactctttttgtggaatttgcaagtggagatttcagccgctttgaagtcaaaggtagaaaaggaaataacttcctataaaaactagaaagaatgattctcagaaactcctttgtgatgtgtgtgttcaactcacagagtttaacctttcttttcatagagcagttagtaaacactctgtttataaagtctccaagtggatattcagacccctttgaggccttcgttggaaacgggatttcttcatattatgctagacagaagaattcccagtaacttctttgtgttgtgtgtgttcaactcacagagttgaactttcatttacacagagcagatttgaaacactctttttgtggaatttgcaagtggagatttcaagcgctttgaggccaaaggcagaaaaggaaatatctttgtataaaaactagacagaatcattctcagaaactgctctgcgatgtgtgtgttcaactctcagagtttaacttttcttttcattcagcagtttggaaacactctgtttgtaaagtctccacgtggataatttgaccacttagaggccttcgttggaaacgggtttttttcatgtaaggctagacagaagaattctcagaatcttccttgtgttgtgtgtattcaactcacacagttgaacgacggtttacacagagcagatttgaaacactctttttgtggaatttgcaagtggagatttcagctgctttgaggtcaatggtagaaaaggaaatatcttcgtataaaaactagacagaatgattctcagaaacttctttgtgatgtgtgcgttcaactcacagagtttaacctttcttttcatagagcagttaggaaacactctgtttgtaaactctgcaagtggatattcagacctttttgaggccttcgttggaaacgggatttcttcatactgtgctagacagaataattctcagtaacttccttgtgttgtgtgtattcaactcacagagttgaaggatcctttacagagagcaggcttgaaacactctttttgtcgaatttgcaagtggagatttcagccgctttcaggtcaatggtagaataggaagtatcttcttatagaaactagacagaatgattctcagaaactcttttgtgatgtgtgcgttcaactcacagagtttaacctttcttttcatagagcagttaggaaacactctgtttgtaaaggctgcacgtggatatttggacttctttgaggccttcattggaaacgggtttttttcatgtaaggctagacagaagaattcccagtaacttccttgtgttgtgtgtgttcaaatcacagagttgaactttcatttacacagagcagatttgaaacactctttttgtggaatttgcaaatggagatttcaagcgctttgaggccaaaggcagaaaaggaaatatcttcgtataaaaactagacagaatcattctcagaaactgctctgcgatgtgtgcgttcaactctcagagtttaacttttcttttcattcagcagtttggaaacactctgttcgtaaagtctgcacgtggataacttgaccacttagaggccttcgttggaaacgggtttttttcctgtaaggctagacagaagaattcccagtaacttccttgtgttgtgtgcattcaactcacagagttgaacgttcccttagacagagcagatttgaaacactctgtgcaatttgcaagtgtagatttcaagcgctttaaggtcaacggcagaaaaggaaatatcttcgtttcaaaactagacagaaatcattcccacaaactgcgttgtgatgtgttcgttcaactcacagaagtttaacctttcttttcatagagcagttaggaaacagtctgtttgtaaattctgtaagtggatattctgacatcttgtggccttcgttggaaacgggatttcttcatattctgctagacagaagaattctcagtaacttccttgtgttgtgtgtattcaactcacggagttgaacgatcgtttacacagagcagacttgaaacactctttttgtggaatttgcaagtggagatttcagccgcgttgaggtcaatggtagaaaaggaaatatcttcgtataaaaactagacagaatgattctcagaaacttcattgtgatgtgtgcgttcaactcacagagtttaacctttcttttcatagagcagttaggaaacactctgtttgtaaactctgcaagtggatattcagacctctttcaggccttcgttggaaacgggatttcttcatactgtgctagacagaagatttcccagtaacttccttgtgttgtgtgtgttcaactcacagagttgaactttcatttacacagagcagatttgaaacactctttttgtggaatttgcaaatggagatttcaagcgctttgaggccaaaggcagaaaaggaaatatcttcgtataaaaactagacagaatcattctcagaaactgctctgcgatgtgtgcgttcaactctcacagtttaacttttcttttcattcagcagtttggaaacactctgtttgtaaagtctgcacgtggataatttgaccacttagaggcctttgttggaaacgggttattttcatgtaaggctagacagaagaattcccagtaacttccttgtgttgtgtgcaatcaaatcacagagttgaacgttcccttagacagagtagatttgaaacactctatttgtgcaatttgcaagtgtagatttcaagcgctttaaggtcaaaggcagaaaaggaaatatcttcgtttcaaaactagacagaacgattctcagaaactcctttgtgatgtgtgcgttgaactcacagagtttaacctttcttttcatagagcagttaggaaacactctgtttgtaaagtctgcaagtggatattcagacctctttgaggccttcgttggaaacgggatttctccatattctgctagacagaagaattctcagtaacttccttgtgttgtgtgtattcaactcacagagttgaacgatcctttaaacagagcagacttgaaacactctttttgtggaatttgcaagtggagatttcagccgctttgaggtcaatggtagaaaaggaaactaccttcatataaagactagacagaatgattctcagaaactcctttgtgatgtgtgcgttcaactcacagagtttaacctttcttttcatagagcagttaggaaacactctgcttgtaaagtctgcaagtggatattcagtcctctttgaggccttcgttggaaacgggtttttttcatataaggctagacagaagaattcccagtaacttcccttgtgttgtgtgtgttcaactcacagagttgaactttcatttacacagagcagatttgaaacactctttttgtggaatttgcaggtggagatttcaagcgctttgaggccaaaggcagaaaaggaaatatcttcgtataaaaactagacagaatcattctcagaaactgctctgcgatgtgtgcgttcaactctcaagagtttaacttttcttttcattcagcagtttggaaacactctgtttgtaaagtctgcacgtggatattttgaccacttagaggccttcgttggaaacgggtttttttcctgtaaggctagacagaagaattcccagtaacttccttgtgttgtgtacattcaactcacagagttgaacgttcccttagacagagcagatttgaaacactctttttgtgcaattggcaagtggtgatttcagccgctttgaggtcaatggtagaaaaggaaatatcttcgtataaaaactagacagaatgattctgagaaactcctttgtgatgtgtgcgttaaactcacagagtttaccctttcttttcatagagcagttaggaaacactctgtttgtaaagtctgcaagtggatattcagacatccttgaggctttcgttggaaacgggatttcttcatattctgccagaaagaagaattctcagtaacttccttgtgttgtgtgtattcaactcacacagttgaacgatcctttacacaaagcagacttgtaacactctttttgtggaatttgcaagtggggatttcagccgctttgaagtcaaatgtagaaaaggaaatatcttcctataaaaactagacagaatgattctcagaaacttctttgtgatgtgtgcgttcaactcacagagtttaacctttcttttcatagagcagttaggaaacactctgtttgtaaactctgcaagtggatattcagacctactttgaggccttcgttggaaacgggatttcttcatactgtgctagacagaagaattctcagtaacttccttgtgttgtgtgtattcaactcacagagttgaacgatcgtttacacagagcggacttgaaacactctttttgtggaatttgcaattggagatttcagccgcgttgaggtcaatggtagaaaaggaaatctcttcgtataaaaactagacagaaccattctcagaaactgctctgcgatgtgtgcgttcaactctcagagtttaacttttcttttcattcagcagtttggaaacactctgtttgtaaagtctgcacgtggatattttgaccacttagaggccttcgttggaaacgggtttttttcctgtaaggctagacagaagaattcccagtaacttccttgtgttgtctacattcaactcacagagttgaacgttcccttagacagagcagatttgaaacactctttttgtgcaattggtaagtggtgatttcagccgctttgaggtcaaaggtagaaaaggaaatatcttcgtataaaaactagacagaatcattcccaaaaactgcgttgtgatgtgctcgttcaactcacagagtttaacctttcttttcatagagcagttaggaaacagtctgtttgtaaattctgtaagtggatattctgacatcttgtggccttcgttggaaacgggatttcttcatattctgctagacagaagaattctcagtaacttccgcgtgttgtgtgtattcaactcacagagttgaacgatcctttacacagagcagacttgacacactctttttgtggaatttgcaagtggagatttcagccgctttgaggtcaatggtagaaaaggaaatatcttcgtataaaaactagacagaatgattctcagaaactcctttgtgatgtgtgcgttcaactcacagagtttaacctttcttttcatagagcagttaggaaacactctgtttgtaaagtctgcaagtggatattcagccctctttgaggccttcgttggaaacggttttttttcatataaggctagacagaagaattctcagtaacttccttgtgttgtgtgtattcaactcacagagttgaactttcatttagagagagcagatttgaaacactgtttttgtggaatttgcaagtggagatttcaagcgctttgcggccaaaggtagaaaacgaaatatcttcgtataaaaactagacagaatcattctcagaaactgctgcgtgatgtgtgcgctcaactctcagagtttaacttttcttttcattcagcggtttggaaacactctgtttgtaaagtctgcacgtggacattttgaccacttagaggccttcgttggaaacgggtttttttcatgtaaggctagacagaagaattctcagtaacttccttgtgttgtgtgtattcaactcacagagttcaacgatgctttacacagagtagacttgaaacacactttttgttgaatttgcaactggagatttcagccgctttgaggtcaatggtagaataggtaatatcttcctatagaaactagacagaatgattctcagaaactcctttgtgatgtgtgcgctcaactcacagagtttagcctttcttttcatggagcagttaggaaacactctgtttgtaaagtctgcaagtggatattcagacctctttgaggccttcgttggaaacgggatttcttcatattctgctagacagaagaattctcagaaacttccttgtgttgtgtgtattcaactcacagagttgaacgatcctttacacagagcagacttgaaacactctttttgtggaatttgcaagtggagatttcagccgctttgaggtcaatgttagaataggaaatatcttcctatagaaactagacagaatgattctcagaatctcctttgtgatgtgtgcgttcaactcacagagtttaacctttcttttcatagagcagttaggaaacactctgtttgtaaagtctgcaagtggatattcagacctctttgaggccttcgttggaaacgggtttttttcatataaggctagacagaagaattcccagtaacttccttgtgttgtgtgtgttcaactcacagagttgaactttgatttacacagagcagatttgaaacactctttttgtggaatttgcaggtggagatttcaagcgctttgaggccaaaggcagaaaaggaaatatcttcgtataaaaactagacagaatcattctcagaaactgctctgcgatgtgtgcgttcaactctcagagtttaacttttcttttcattcagaagtttggaaacactctgtttgtaaagtctgcacgtggataacttgaccacttagaggccttcgttggaaacgggtttttttcatgtacggctagacagaagaattcccagtaacttccttgtgttgtgtgcattcaactcacagagttgaacgttcccttagacagagcagatttgaaacactctatttgtgcaatttgcaagtgtagatttcaaccgctttaaggtcaatggcagaaaaggaaatatcttcgtttcaaaactagacagaatcattctcagaaactgctctgcgatgtgtgcgttcaactctcagagtttaacttttcttttcattcagcagtttggaaacactctgtttgtaaagtctgcacgtggataatttgtccacttagaggccttcgttggaaacgggtttttttcatgtaaggctagacagaagaattctcagtaacttccttgtgttgtgtgtattcaactcacagagttgaacgatcctttacacagagcagacttgtaacactctttttgtggaatttgcaagtggagatttcagctgctttgaagtcaaaggtagaaaaggaaatatcttcctataaaaactagacagaatgattgtcagaaactcctttgtgatgtgtgcgttcaactcacagagtttaacctttcttttcatagagcagttaggaaacactctgtttgtaaagtctgcaagtggatattcagacttctttgaagccttcgttggaagcgggatttcttcatattctgctagaaagaagaattcccagtaacttcccttgtgttgtgtgtgttcaactcacagagttgaactttcatttacacagagcagatttgaaacactctttttgtggaatttgcaagtggagatttcaagcgctttgaggccgaaggcagaaaaggaaatatcttcgtttcaaaactagacagaatcattctcagaaactgctctgcgatgtgtgtgttcaactctcagagtttaacttttcttttcattcagcagtttggaaacactctgtttgtaaagtctgcacgtggatattttgaccacttagaggccttcgttggaaacgggtttttttcctgtaaggctagacagtagaattcccagtaacttccttgtgttgtgtgcattcaactcacagagttgaacgttcccttagacagagcagatttgaaacactctatttgtgcaatttgcaagtgtagttttcaagctctttaaggtcaacggcagaaaaggaaatatcttggtttcaaaactagacagaatcattcccacaaactgcgttgtgatgtgttcgttcaactcacagagtttaacctttcttttcatagagcagttaggaaacagtctgtttgtaaattctgtaagtggatattctgacatccttgtggccttcgttggaaacgggatttcttcatattctgctagacagaagaattctcagtaacttccttgtgttgagtgtattcaactcacagagttgaacgatcctttacacagagcagacttgtaacactctttttgtggaatttgcaagtggagatttcagccgctttgaagtcaaaggtagaaaaggaaatatcttcctataaaaactagacagaatgattctcagaaactcctttgagatgtgtgtgttcaactcacagagtttaacctttcttttcatagagcagttaggaatcactctgtttgtaaagtctgcaggtggatattcagacctctttgaggccttcgttggaaacgggtttttttcatataaggctagagagaagaattcccagtaacttccttgtgttggctgtgttcaactcacagagttgaactttcatttacacagagcagatttgaaacactctttttgtggaatttgcaaatggagatttcaagcgctttgaggccaaaggcagaaaaggaaatatcttcgtataaaaactcgacagaatcattctcagaaactgctctgcgatgtgtgcgttcaactctcagagtttaacttttcttttcattcagcagtttggaaacactctgtttgtaaagtcttcacgtggataatttgaccacttagaggccttcgttggaaacgggtttttttcatgtaaggctagacagaagaattcccagtaacttccttgtgttgtgtacattcaactcacagagttgaacgttcccttagacagagcagatttgaaacactctttttgtgcaattggcaagtggagatttcaagcgctttaaggtcaatggcagaaaaggaaatatcttcgtttcaaaactagacagaatcattctcagaaactgctctgcgatgtgtgtgttcaactctcagagtttaacttttcttttcattcagcagtttggaaacactctgtttgtaaagtctgcacgtggataatttgaccacttagaggccttcattggaaacgggtttttttcatgtaaggctagacagaagaattctcagtaacttccttgtgttgtgtgtattcaactcacagagttgaccgatcctttacacagagcagacttgtaacactctttttgtggaatttgcaagtggagatttcagccgctttgaagtcaatggtagaaaaggaaatatcttcctataaaaactagacagaatgattctcagaaactcctttgtgatgtgtgcgttcaactcacagagtttaaccttccttttcatagagcagttaggaaacactctgcttgtaaagtctgcaagtggatattcagacctctttgaggccttccttggaaacgggattttttcatataaggctagacagaagaattcccagtaacttccttgtgttgtgtgtattcaactcacagagttgaactttcatttacacagagcagatttgaaacactctttttgtggtatttgcaagtggagatttcagccgctttgatgtcaatgatagaaaaggaaatatcttcgtataaaaactagacagaatcattctcagaaactgctgcgtgatgtgtgcgttcaactctcagagtttaacttttcttttcattcagcggtttggaaacactctgtttgtaaagtctgcacgtggatattttgaccacttagaggtcttcgttggaaacgggttttttttaatgtaaggctagacagaagaattcccagtaacttccttgtgttgtgtacattcaactcacagagttgaacgttcccttagacagagcagatttgaaacactctttttgtgcaattggcaaatggagatttcaagcgctttaaggtcaatggcagaaaaggaaatatcttcgtttcaaaactagacagaatcattcccacaaactgcgttgtgatgtgttcgttcaactcacagagtttaacctttctgttcatagagcagttaggaaacactctgtttgtaaagtctgcaagtggatattcagacctccttgaggctttcgttggaaacgggatttcttcatattctgctagacagagaagattctcagaaacttccttgtgttgtgtgttttcaactcacagagttgaacgatcctttacacagagcagacttgaaacactccttttgtggaatttgcaagtggagatttcagccgctttgaggtcaatggtagaataggaaatatcttcctatagaaactagacagatgattctcagaaactcctttgagatgtgtgcgttcaactcacagagtttaacctttcttttcatagagcagttaggaaacactctgtttgtaaagtctgcaagttgatattcagacctccttgaggccttcgttggaaacgggatttcttcatattatgctagacagaagaattcccagtaacttcccttgtgttgtgtgtgttcaactcacagagttgaactttcatttacacagagcagatttgaaacactctttttgtggaatttgcaaatggagatttcaagcgctttgcggccaaaggcagaaaaggaaatatcttcgtataaaaactagacagaatcattctcagaaactgctctgcgatgtgtgcgtttaactctcagagtttaacttttcttttcattcagcagtttggaaacactctgtttgtaaagtctgcacgtggataacttgaccacttagaggccttcgttggaaacgggtttttttcatgtaaggctagacagaagaattcccagtaacttccttgtgttgtgtgcattcaactcacagagttgaacgttcccttagacagagcagatttgaaacactctatttgtgcaatttgcaagtgtagttttcaagctctttaaggtcaacggcagaaaaggaaatatcttggtttcaaaactagacagaatcattctcagaaactgctctgcgatgtgtgctttcaactctcagagtttaacttttcttttcattcagcagtttggaaacactctgtttgtaaagtctgcacgtggataacttgaccacttagaggccttcgttggaaacgggtttttttcatgtaaggctagacagaagaattctcagtaacttccttgtattgtgtgtattcaactcacatagttgaacgatcctttacacagagcatacttgaaacactcttcttgtggaatttgcaagtggagatttcagccgctttgaggtcaatggtagaataggaaatatcttcctatagaaactagacagaatgattctcagaaactcctttgtgatgtgtgcgttcaactcacagagtttaacctttgttttcatagagcagttaggaaacactctgtttgtaaagtctgcaagtggatattcagacctgcttgaggccttctttggaaacgggatttcttcttattatgccagacagaagaattcccagtaacttccttgtgttgtgtgtgttcaactcacagagttgaactttcatttacacagagcagatttgaaacactctttttgtggaatttgcaaatggagatttcaagcgctttgaggccaaaggcagaaaacgaaatatcttcgtataaaaactagacagaatcattctcagaaactgctgcgtgatgtgtgcgttcaactctcagagtttaacttttcttttcattcagcggtttggaaacattctgtttgtaaagtctgcacgtggatattttgaccacttagaggccttcgttggaaacgggtttttttcatgtaaggctagacagaagaattcccaggaacttccttgtgttgtgtacattcaactcacagagttgaacgttcccttagacagagcagatttgaaacactctttttgtgcaattggcaaatggagatttcaagcgctttaagttcaatggcagaaaaggaaatatcttcgtttcaaaactagacagaatcattcccacaagctgcgttgtgatgtgttcgttcaactcacagagtttaacctttctgttcatagagcagttaggaaacactctgtttgtaaagtctgtaagtggatattctgacatcttgtggccttcgttggaaacgggatttcttcatattctgcaagacagaagaattctcagttacttccttgtgttgtgtgtattcaactcacagagttgaacgatcctttacacagagcagacttgaaacactctttttatggaatttgcaagtggagatttcagccgctttgaggtcaatggtagaaaaggaaatatcttcgtataaagactagacagaatgattctcagaaactcctttgtgatgtgtgcgttcaactcacagagtttcacttttcttttcatagagcagttaggaatcactctgtttgtaaagtctgcaagtggatattcagacctctttgaggccttcggtggaaacgggatttcttcatattatgctagacagaagaattctcagtaacttccttgtgttgtgtgtattcaactcacagagttgaaagatcctttacagagagcaggcttgaaacactctttttgtcgaatttgcaagtggagatttcagccgctttgaggtcaatggtagaataggaaatatcttcttatagaaactagacagaatcattctcagaaactgctgcgtgatgtgtgcgttcaactctctgagtttaacttttcttttcattcagcggtttggaaacactctgtttgtaaagtctgcacgtggatattttgaccacttagaggccttcgttggaaacgggtttttttcatgtaaggctagacagaagaattcccagtaacttccttgtgttgtgtgcattcaactcacagagttgaacgttcccttagacagagcagatttgaaacactctatttgtgcaatttgcaagtgtagatttcaagcgctttaaggtcaacggcagaaaaggaaatatgttcgtttcaaaactagacagaatgattctcagaaactcctttgtgatgtgtgcgttcaactcacagagtttcacctttcttttcatagagccgttaggaaacactctgtttgtaaagtctgcaagtggatattcagacctccttgaggccttcgttggaagcgggatttcttcatattatgctagacagaagaattctcagtaacttccttgtgttgtgtgtattcaactcacagagttgaacgatcctttacacagagcatacttgaaacactcttgttgtggaatttgcaagtggagatttcagccgctttgaggtcaatggtagaataggaagtatcttcctatagaaactagacagaatgattctcagaaactcctttgtgatgtgtgcgttcaactcacagagtttaacctttcttttcatagagcagttaggaaacactctgtttgtaatgtctgcaagtggatattcagacctctttgaggccttcgttggaaacgggatttcttcatattatgctagacagaagaattcccagtaacttccttgtgttgtgtgtgttcaactcacagagttgaactttcatttacccagagcagatttgaaacactctttttgtggaatttgcaagtggagatttcaagcgctttgaggccaaaggcagaaaaggaaatatcttcgtttcaaaactagacagcatcattctcagaaactgctctgcgatgtatgcgttcaactctcagagtttaacttttcttttcattcagcagtttggaaacactctgtttgtaaagtctgcacgtggatattttgaccacttagaggccttggttggaaacgggtttttttcatgtaaggctagacagaagaattcccagtaacttccttgtgttgtgtacattcaactcacagagttgaacgttcccttagacagagcagatttgaaacactctttttgtgcaattggcaagtggagatttcaagcgctttaaggtcaatggcagaaaaggaaatatcttcgtttcaaaactaggcagaatcattcccacaaactgcgttgtgatgtgttcgttcaactcacagagtttaacctttccgttcatagagcagttaggaaacacactgtttgtaaagtctgtaagtggatattctgacatcttgtggccttcgttggaaacgggatttcttcatattctgctagacagaagaattctcagtaacttccttgtgttgtgtgtattcaactcacagagttgcacgatcctttacacagagcagacttgaaacactctttttgtggaatttgcaagtggagatttcagccgctttgagttcaatggtagaataggaaatatcttcctatagaaactagacagaatgattctcagaatctcctttgtgatgtgtgcgttcaactcacagagttcaacctttcttttaatagagtagttgggaaacactctgtttgtaaagtctgcaagtggatattcagacttctttgaggccttcgttggaagcgggatttcttcatattctgctagacagaagaattctcagtaacctccttgtgttgtgtgtattcaactcacagagttgaacgaccctttacacagagcagacttgaaacactctttttgtggaatttgcaagtggagatttcagccgctttgaggtcaatggtagaataggaaatatcttcctatagaaactagacagaatcattctcagaaactgctgcgtgatgtgtgcgttcaactctcagagtttaacttttcttttcattcagcggtttggaaaccctctgtttgtaaagtctgcacgtggatattttgaccacttagaggccttcgttggaaacgggttttttgtatgtaaggctagacagaagaattcccagtaacttccttgtgttgtgtgcattcaactcacagagttgaacgttcccttagacagagcagatttgaaacactctatttgtgcaatttgcaagtgtagatttcaagcgctttaaggtcaacggcagaaaaggaaatatcttcgtttcaaaactagacagaatgattctcagtaaactcctttgtgacgtgtgcgttcaactcacagagtttaacctttctgttcatagagcagttaggaaacactctgtttgtaaagtctgcaagtggatattcagacctccttgaggccttcgttggaaacgggatttcttcatattctgatagacagaagaattctcagtaacttcccttgtgttgtgtgtattcaactcacagagttgaacgatcctttacacagagcagacttgaaacactctttttgtggaatttgcaagtggagatttcagccgctttgaggtcaatgttagaataggaaatatcttcctatagaaactagacagaaatgattctcagaaactcctttgtgatgtgtgcgttcaactcacagagtttaacctttcttttcatagagcagttaggaaacactctgtttgtaaagtctgcaagtggatattcagacctgtttgaggccttcgttggaaacgggtttttttcatataaggctagacagaagaattctcaggaacttccttgtgttgtgtgtattcaactgacagagttgaactttcatttagagagagcagatttgaaacactgtttttgtggaatttgcaagtggagattccaagcgctttggggccaaaggcagaaaaggaaatatcttcgtagaaaaactagacagaatcattctcagaaactgctctgcgatatgtgcgttcaactctcagagtttaacttttcttttcattcagcagtttggaaacactctgtttgtaaagtctgcacgtggatattttgaccacttagaggccttcgttggaaacgggtttctttcctgtaaggctagacagaagaattcccagtaacttccttgtgttgtgtacattcaacacacagatttgaacgttcccttagacagagctgatttgaaacactctttttgtgcaattggcaagtggagatttcaagcgctttaaggtcaatggcagaaaagtaaatatcttcgtttcaaaactagacagaatcattcccacaaactgcgttgtgatgtgttcgttcaactcacagagtttaacctttcttttcatagagcagttagcaaacagtctgtttgtcaattctgtaagtggatattctgacatcttgtggccttcgttggaaacgggatttcttcatattctgctagacagaagaattctcagtaacttccttgtgttgtgtgtattcaactcacagagttgaatgatcctttacacagagcagacttgaaacactctttttgtggaatttgcaagtggagatttcagccgctttgaggtcaatagtagaaaaggaaatatcttcgtagaaaaactagacagaatgattctcagaaaatcctttgtgatgtgtgcgttcaactcacagagtttaacttttcttttcatagagcagtttggaaacactctgtttgtaaagtctgcaagtggatattcagacctctttcaggccttcgtcggaaacgggatttcttcatattatgctagacagaagaattcccagtaacttccttgtgttgtgtgtgttcaactcacagagttgaactttcatttacacagagcagatttgaaacactctttttgtggaatttgcaaatggagatttcaagcgctttgaggccaaaagcagaaaaggaaatatcttcgtataaaaactagacagaatcattctcagaaactgctgcgtgatgtgtgcgttcaactctcagagtttaactattcttttcattcagcggtttggaaacactctgtttgtaaagtctgcacgtggaaattttgaccacttagaggccttcgttggaaacgggtttttttcatgtaaggctagacagaagaattcccagtaacttccttgtgttgtgtacattcaactcacagagttgaacgttcccttagacagagcagatttgaaatactctttttgtgcaattggcaagtggagatttcaagcgctttaaggtcaatggcataaaaggaaatatcttggtttcaaaactagacagaatcattcccacaaaccgcgttgtgatgtgttcgttcaactcacagagtttaacctttctgttcatagagcagttaggaaacactctgtttgtaaagtctgtaagtggatattctgacaacttgtggccttcgttggaaacgggatttcttcatattctgctagacagaagaattctcagtaacttcccttgtgttgtgtgtattcaactcacagagttgaatgatcctttacacagaacagtcttgaaacactctttttgtggaatttgcaagtggagatttcagccgctttgaggtcaatggtagaataggatatatcttcctatagaaactagacagaatgattctcagaaactactttgtgatgtgtgcgttcaactcacagagtttaacctttcttttcatagagcagttaggaaacactctgtttgtaaagtctgcaagtggatattcagacctctttgaggccttcgttggaaacgggatttcttcatactgtgctagacagaagaattctcagtaacttcccttgtgttgtgtgtattcaactcacagagttgaacgatcctttacacagagcggacttgaaacacactttttgtggaatttgcaagtggagatttcaagcgctttgaggccaaaggcagaaaaggaaatatcttcgtataaaaactagacagaatgattctcagaaactcctttgtaatgtgtgcgttcaactcacagagtttaacctttcttttcatagagcagttaggaaacactctgtttgtaaagtctgcaagtggatattcagacctctttgaggccttcgttggaaacgggttattttcatataaggctagacagaagaattccctttaaattgcttgtgttgtgtgtattcaactgacagatttgaactttcatttagacagagcagatttgaaacactctttttgtgcaatttgcaagtggaaatttcaaacgctttaaggtcaatggcagaaaaggaaatatcttcgtttcaaaactagacagaatcattcccacaaactgcgttgtgctgtgttcgttcaactcacagagtttaacctttcttttcatagagcagttaggaaacactctgtttgtaaactctgcaagtggatattcacacctcttagaggccttcgttggaaacggtatttcttcatattatgctagatagaagaaatctcagtaacttccttgtgttgtgtttattcaactcacagagttgaacgatcctttacacagagcagacttgaaacactctttttgtggaatttgcaagtggagatttcagccgctttgaggtcaatggtagaaaagtaaatatcttcgtataaagactagacagaatgattctcagaaacttcttggtgatgtgtgcgttcaactcacagagtttaacctttcttttcatagagcagttaggaaacactctgtttgtaaactctgcaagtggatattcacacctctttgaggccttcgttggaaacgggatttcttcatactgtgctacacagaagaattctcagtaacttccttgtgtagtgtgtattcaactgacagagttgaactttcatttagagagagcagatttgaaacactgtttttgtggaatttgcaagtggagatttcaagcgctttggggccaaaggcagaaaaggaaatatcttcgtataaaaactagacagaaacattctcagaaactgatgcgtgatgtgtgcgttcaactctcagagtttaacttttcttttcattcagcggtttggaaacactctgtttgtaaagtctgcacgtggaaattttgaccacttagaggccttcgttggaaacgggtttttttcatgtaaggctagacagaagaattcccagtaacttccttgtgttgtgtgcattcaactcacagagttgaacgttcccttagacagagcagatttgaaacactctatttgtgcaatttgcaagtgtagttttcaagctctttaaggtcaacggcagaaaaggaaatatcttcgtttcaaaactagacagaatcattcccacaaactgcgttgtgatgtgtacgttcaactcacagagtttaacctttccgttcatagagcagttaggaaacactctgtttgtaaagtctgtaagtggatattctgacatcttgtggccttcgttggaaacgggatttcttcatattctgcgagacagaagaattctcagtaacttccttgtgttgtgtgtattcaactcacagaagttgaacgatcctttacacagagcagacttgtaacactctttttgtggaatttgcaagtggagatttcagccgctttgaagtcaaaggtagaaaaggaaatatcttcctataaaaactagacagaacgattctcagaaactcctttgtgatgtgtgcgttcaactcacagagtttaacctttcttttcatagagcagttaggaaacactctgtttgtaaagtctgcaagtggatattcagacctctttgaggccttcgttggaaacggggatttcttcatattctgctagacagaagaattctcagtaacttccttgtgttgtgtgtattcaactgacagagttgaactttcatttagagagagcagatttgaaacactgtttttgtggaatttgcaagtggagattacaagcgctttggggccaaaggcagaaaaggaaatatcttcgtataaaaactagacagaatcattctcagaaactgctgcgtgatgtgtgcgttcaactctcagagtttaacttttcttttcattcagcggtttggaaaaactctgtttgtaaagactgcacgtggatattttgaccacttagaggccttcgttggaaacgggttttttttcatgtaaggctagacagaagaattcccagtaacttccttgtgttgtgtacattcaactcacggagttgaacgttcccttagacagagcagatttgaaacactctttttgtgcaattggcaaatggagatttcaagcgctttaagttcaaaggcagaaaaggaaatatcttcgtttcaaaactagacagaatcattcccacaaactgcgttgtgatgtgttcgttcaactcacagagtttaacctttctgttcatagagcagttaggaaacactctgtttgtaaagtctgtaagtggatattctcacatcttgtggccttcgttggaaacgggatttcttcatattctgctagacagaagaattctcagtaacttccttgtgttgtgtgtattcaactcacagagttgaacgatcctttacacagagcagacttgtaacactctttttgtggaatttgcaagtggagatttcagccgctttgaagtcaaagtagaaaaggaaatttcttcctataaaaactagacagaatgattctcagaaactcctttgacatgtgtgcgttcaactcacagagtttaacctttcttttcatagagcagttaggaatcactctgtttgtaaagtctgcaagtggatattcagacctctttgaggccttcgttggaaacgggtttttttcatataaggctagacagaagaattcccagtaacttccttgtgttgtgtgtgttcaactcacagagttgaactttcatttacacagagcagatttgaaacactctttttgtggaatttgcaagtggagatttcaattgctttgaggccaaaggcagaaaaggaaatatcttcgtataaaaactagacagaatcattctcagaaactgctctgtgatgtgtgcgttcaactctcagagtttaactttgcttttcattcagcagtttggaaacactctgtttgtaaagtctgcacgtggataatttgaccacttagaggccttcgttggaaacgggtttttttcatgtaaggctagacagaagaattcccagtaacttccttgtgttgtgtgcattcaactcacagagttgaacgttcccttagacagagcagatttgaaacactctatttgtgcaatttccaagtgtagatttcaagcgctttaaggtcaacggcagaaaaggaaatatcttcgtttcaaaactagagagaatcattcccacaaactgcgttgtgatgtgttcgttcaactcacagagtttaacctttctgttcatagagcagttaggaaacactctgtttgtacagtctgccagtggatattcagacctccttgaggccttcgttggaaacgggatttcttcatattctgctagacagaagaattctcagtaacttccttgtgttgtgtgtattcaactcacagagttgcacgatcctttacacagagcagacttgtaacactctttttgtggaatttgcaagtggagatttcagccgctttgaagtcaaaggtagaaaaggaaatatcttcctataaaaactagacagaatgattctcagaaactcctttgtgatgtgtgcgttcaactcacagagtttaacctttcttttcatagagcagttaggaaacactctgtttgtacagtctgcaagtggatattcagacatccttgaggctttcgttggaaacgggatttcttcatattctgctagacagaagaattctcagtaacttccttgtgttgtgtgtattcaactgtcagagttgaactttcatttagagagagcacatttgaaacactgtttctgtggaatttgcaagtggagatttcaaacgctttggggccaaaggcagaaaaggaaatatcttcgtataaaaactagacagaatcatactcagaaactgctgcgtgatgtgtgcgttcaactctcagagtttaacttttcttttcattcaacggtttggaaacactctgtttgtaaagtctgcacgtggatattttgaccacttagaggccttcgttagaaacgggttttttcatgtaaggctagacagaagaattctcagaaacttcgttgtgttgtgtgttttcaactcacagagttcaacgatcctttacacagagtagacttgaaacactctttttgtggaattggcagggtggagatttcagccgctttgaggtcagtggtagaaaaggaaatatcttcgtataaaaactagacagagtgattctcagaaactcctttgtgatgtctgcgttcaactcacagagtttaacctttcttttcatagagcagttaggaaacactgtgtttgtaaagtctgcaagtggatattcagacctccttgaggccttcgttggaaacgggatttcttcatattctgctatacagaagaattctcagaaacttccttgtgttgtgtgtattcaactcacagagttgaacgatcctttacacagagcagacttgaaacactctttttgtggaatttgcaagtggagatttcagccgctttgaggtcaatggtagaataggaaatatcttcctatagaaactagacagaatgattctcagaaactcctttgtgatgtgtgcgttcaactcacagagttcaacctttcttttcatagagcagttgggaaaaactctctttgtaaagtctgcaagtggatattcagacttctttgaggccttcgttggaagcggggtttcttcatattctcctagacagaagaattcccagtaacttccttgtgttgtgtgtgttcaactcacagagttgaactttcatttacacagagcagatttgaaacactctttttgtggaatttgcaagtggagatttcaagcgctttgaggccaaaggcagaaaaggaaatatcttcgtttgaaaactagacagaatcattctcagaaaatgctctgtgatgtgtgcgttcaactctcagagtttaacttttgttttcattcagcagtttggaaacactctgtttgtaaagtctgcacgtggatattttgaccacttagaggccttcgttggaaacgggtttttttcatgtaagggtagacagaagaattcccagtaacttccttgtgttgtgtacattcaactcacagagttgaacgttcccttagacagagcagatttgaaacactctttttgtgcaattggcaaatggagatttcaagcgctttaaggtcaatggcagaaaaggaaatatcttcgtttcaaaactagacagaatcattcccacaaactgcgttgtgatgtgttcgttcaactcacagagtttaacctttcttttcatagagcagttaggaaacagtctgtttgtaaattctgtaagtggatattctgacatccttgtggccttcgttggaaacgggatttcttcatattctgctagacagaagaattctcagtaacttccttgggttgtgtttattcaactcacagagttgaatgatcctttacacagagcagacttgaaacactctttttgtggaatttgcaagtggagatttcagccgctttgaggtcaatggtagaaaagtaaatatcttcgtataaagactagacagaatgattgtcagaaactcctttgtgatgtgtgcgttcaactcacagagtttaacctttcttttcatagagcagttaggaaacactctgtttgtaaagtctgcaagtggatattcagacctccttgaggccttcgttggaaacgggatttcttcatattctgctagacagaagaattctcagtaacttccttgtgttgtgtgtattcaactgacagagttgaactatcatttagagagagcagatttgaaacactgtttttgtggaatttgtaagtggagatttcaagcgctttggggccaaaggcagaaaaggaaatatcttcgtataaaaactagacagaatcattctcagaaactgctgcgtgatgtgtgcgttcaagtctcagagtttaacttttcttttcattcagcggtttggaaacactctgtttgtaaagtctgcacgtggaaattttgaccacttagaggccttcgttggaaacgggtttttttcatgtaaggctagacagaagaattcccagtaacttccttgtgttgtgtgcattcaactcacagagtggaacgttcccttagacagggcagatttgaaacactctatttgtgcaatttgcaagtgtagatttcaagcgctttaaggtcaacggcagaaaaggaaatatcttcttttcaaaactagacagaatcattcccacaaactgcgttgtgatgtgttcgttcatctcacagagtttaacctttcttttcgtagagcagttaggaaacagtctgtttgtaaattctgtaagtggatattctgacatcttgtggccttcgttggaaacgggatttcttcatactgtgctagacagaagaattctcagtaacttccttgtgttctgtgtattcaactcacagagttgaacgatcctttacacagagcagacttgaaacactctttttgtggaatttgcaagtggagatttcagccgctttgaggtcaatggtagaataggaaatatctttctatagaaactagacagagtgattctcagaaactcctttgtgatgtctgcgttcaactcacagagtttaacctttcttttcatagagcagttaggaaacactctgtttgtaaagtctgcaagtggatattcagacctccttgaggccttcgttggaaatgggatttcttcatattctgctatacagaagaattctcagtaacttccttgtgttgtgtgtattcaactcacagagttgaacgatcctttacacagagcatacttggaacactcttcttgtggaatttgcaagtggagatttcagccgctttgagatcaatggtagaataggaaatatcttcgtataaaaactagacagaatcattctcagaaactgctctgtgatgtgtgcgttcaactctcaaagtttaacttttcttttcattcagcagtttggaaacactctgtttgtaaagtctgcacgtggatattttgaccacttagaggccttcgttggaaacgggttttttttcatgtaaggctagacggtagaattcccagtaacttccttgtgttgtgtgcattcaactcacagagttgaacgttcccttagacagagcagatttgaaacactctatttgtgcaatttgcaagtgtagatatcaagcgctttaaggtcaatggcagaaaaggaaatgtcttagtttcaaaactagacagaatgattctgagaaaatcctttgtgatttgtgcgttcaactcacagagtttaacctttcttttcatagagcagttaggaaacactctgtttgtaaagtctgcaagtggatattcagacctccttgaggccttcgttggaaacgggatttcttcatattatgctagacagaagaattctcagtaacttccttgtgttgtgtgtattcaactcacagagttgaacgatcctttacacagagcagacttgaaacactctttttgtggaatttgcaagtggagatttcagccgctttgaggtcaatggtagaataggaaatatcttcctatagaaagtagacagaatgattctcagaaattactttgtgatgtgtgcgttcaactcacagagtttaacctttcttttcatagagcagttaggaaacactctgtttgtaaagtctgcaagtggatattcagacatctttgaggctttcgttggaaacgggatttcttcttattctgctatacagaagaattctcagtaacttccttttgttgtgtgtattcaactgacagagttgaactttcatttagacagagcagatttgaaacattctttttgtggaatttgcaagtggagatttcaagcgctttgaggccaaaggcagaaaaggatatatcttcgtataaaaactagacagaatcattctcagaaactgctgcgtgatgtgtgcgttcaactctcagagttgaacttttcttttcattcagcggtttggaaacactctgtttgtaaagtctgcacgtggaaattttgaccacttagaggccttcgttggaaacgggtttttttcatgtaaggctagacagaagaattcccagtaacttccttgtgttgtgtacattcaactcacagagttgaacgttcccttagacagagcagatttgaaacactctttttgtgcaattggcaaatggagatttcaagcgctttaaggtcaatggcagaaaaggaaatatcttcgtttccaaactagacagaatcattcccacaaactgcgttgtgatgtgttcgttcatctcacagagtttaacctttcttttcgtagagcagttaggaaacagtctgtttgtaaattctgtaagtggatattctgacatcttgtggccttcgttggaaacgggatttcttcatattctgctagacagaagaattctcagtaacttccttgtgttgtgtgtattcaactcacagagttgaacgatcctttacacagagcagacttgaaacactctttttgtggaatttgcaagtggagatttcagccactttgaggtcaatgttagaataggaaatatcttcctatagaaactagacagaatgattctcagaaactcctttgtgatgtgtgtgttcaactcacagagtttaacctttcttttcatagagcagttagtaaacactctgtttataaagtctgcaagtgaatattcagacccctttgagggcttcgttggaaacgggatttcttcatattatgctagacagaagaattcccagtaacttccttgtgttgtgtgtgttcaactcacagagttgaactttcatttacacagagcagatttgaagcactctttttgtggaatttgcaagtggagatttcaagcgctttgaggccaaaggcagaaaaggaaatatcttcgtttcaaaactagacagaatcattctcagaaactgctctgcgatgtgtgcgttcaactctcagaagtttaacttttcttttcattcagcagtttgaaaacactctgtttgtaaagtctgcacgtggataatttgactacttagaggccttcgttggacacgggtttttttcatgtaaggctagacagaagaattcccagtaacttccttgtgttgcgtacattcagctcacagagttgaacgttcccttagacagagcagatttgaaacactctttttgtgcaattggcaagtggagatttcaagcgctttaaggtcaatggcagaaaaggaaatatcttcgtttcaaaactagacagaatcattcccacaaactgcgttgtgatgtgttcgttcaactcacagagtttaacctttcttttcatagagcagttaggaaacagtctgtttgtaaattctgtaagtggatattctgacatcttgtggccttcgttggaaacaggatttcttcatattctgctagacagaagaattctcagtaacttccttgtgttgtgtgtattcaactcagagagttgaacgatcctttacacagagcagacttgaaacactctttttgtggaatttgcaagtggagatttcagccgctttgaggtcaatggtagaataggaaatatcttcctatagaaactagacagaatgattctcagaaactcctttgtgatgtgtgcgttcaactcacagactttaacctttcttttcatagagcagttaggaaacactctgtttgtaaagtctgcaagtggatattcagacatctttgaggctttcgttggaaacgggttttcttcatattctgctatacagaagaattctcagaaacttccttgtgttgtgtgtcttcaactcacagagttgaacgatgctttacacagagcagacttgaaacactctatttgtggaatttgcaagtggagatttcagccgctttgaggtcaatggtagaataggaaatatcttcttatagaaactagacagaatcattctcagaaactgctctgtgatgtgtgcgttcaactctcagagtttaacttttcttttcattcagtagtttggaaacactctgtttgtaaatctgcacgtggatattttgaccacttagaggctttcgttggaaacgggtttttttcatgtaaggctagacagaagaattcccagtaacttccttgtgttgtgtgcattcaactcacagagttgaacgttcccttagacagagcagatttgaaacactctatttgtgcaatttgcaagtgtagatttcaagcgctttaaggtcaacggcagaaaaggaaatatcttcgtttcaaaactagatagaatcattcccacaaactgcgttgcgatgtgttcgttcaactcacagagtttaacatttcttttcatagagcacttaggaaacagtctgtttgtaaattctgtaagtggatattctgacatcttgtggccttcgttggaaacaggatttcttcatattctgctagacagaagaattctcagtaacttctttgtgttgtgtgtattcaactcacagagttgaacgatcctttacacagagcagacttgaaatactcgttttgtggaatttgcaagtggagatttcagccactttgaggtcaatggtagaaaaggaaatatcttcgtataaatactagacagaatgattctcagaaactcctttgtgatgtgtgcgttcaactcacagagtttaacttttcttttcatagagcagttaggaaacactctgtttgtaaagtctgcaagtggatattcagagctcctttgaggccttcgttggaaacgggatttcttcatattctgctagacagaataattctcagtaacttccttgtgttgtgtgtattcaagtcacagagttgaacgatcctttacagagagcagacttgaaacactctttttgtggaatttgcaattggagatttcaaccgctttgaggtcaatagtagaaaaggaaatatcttcgtagaaaaactagaaagaatcattctcagaaactgctctgcgatgtgtgcgttcaactctcagagtttaacttttcttttcattcaacagtttggaaacactctgtttgtaaagtctgcacgtggataatttgaccacttagaggccttcgttggaaacgggtttttttcctgtaaggctagacagaagaattcccagtaacttccttgtgttgtgtacattcaactcacagagttgaacgttcccttagacagagcagatttgaaacactctttttgtgcaattggcaagtggtgatttcagccgctttgaggtcaatggtagaaaaggaaatatcttcgtataaaaactagacagaatgattctcagaaacttctttgtgacgtgtgcgttcaactcacagagtttaacctttcttttcatagagcagttaggaaacactctgtttgtaaagtctgcaagtggatattcagacctcctcgaggctttcgttggaaacgggatttcttcatattgtgctagacagaagaattctcagtaacttccttgtgttgtgtgtattcaactcacagagttgaacgatcctttacacagagccgacttgaaacactctttttgtggaatttgcaagtggagatttcagccgctttgaggtcaatggtggaaaaggaaatatcttcgtataaaaactagacagaatgattctcagaaactcctttgtgatgtgtgcgttcaactcacagaggttaacctttcttttcatagagcagttaggaaacactctgtttgtaaagtctgcaagtggatattcagacctctttgaggccttcgttggaaaagggtttttttcatataaggctagacagaagaattcccagtaacttccttgtgttgtgtgtgttcaactcacagagttgaactttcatttacacagagcagatttgaaacactctttttgtggaatttgcaagtggagatttcaagcgctttgaggccaaatgcagaaaaggaaatatcttcatataaaaactagacagaatcattctcagaaactgctctgcgaatgtgtgcgttcaactctcagagtttaacttttcttttcattcagcagtttggaaacactctgtttgtaaagtctgcacgtggataatttgaccacttagaggccttcgttggaaacgggtttttttcatgtaaggctagacagaagaattcccagtaactttccttgtgttgtgtacattcaactcacagagttgaacgttcccttagacagagcagatttgaaacactctttttgtgcaattggcaagtggtgatttcagccgctttgaggtcaatggtagaaaaggaaatatcttcgtataaaaactagacagaatcattcccacaaactgcgttgtgatgtgttcgtccaactcacagagtttaacctttctgttcatagagcagttaggaaacactctgtttgtaaagtctgtaagtggatattctgatatcttgtggccttcgttggaaacgggatttcttcatattctgctagacagaataattctcagtaacttccttgtgttgtgtgtattctactcacagagttgaacgatcctttacacagagcagacttgaaacactctttttgtggaatttgcaagtggagatttcagccgctttgaggtcaatggtagaataggaaatatcttcctatagaaactagaccgaatgattctcagaaactcctttgtgatgtgtgcgttcaactcacagagtttaacctttcttttcattgagcagttaggaaacactctgtttgtaaagtctgcaagtggatattcagacctccttgaggacttcgttggaaacgggatttcttcatattatgctagacagaagaattcccagtaacttccttgtgttgtgtgtgttcaactcacagagttgaactttcatttacacagagcagatttgaaacactctttttgtgtaatttgcaagtggagatttcaagcgctttgaggccaaaggcagaaaaggaaatatcttcgtttcaaaactagacagaatcattctcagaaactgctctgtgatgtgtgcgttcaactctcagagtttaacttttcttttcattcagcagtttggaaacactctctttgtaaagtctgcacgtggatattttgaccacttggaggccttcgttggaaacgggtttttttcatgtaaggctagacaggagaattctcagtaacttccttgtgttgtgtacattcaactcacagagttgaacgttcccttagacagagcagatttgaaacactctttttgtgcaattggcaagtggtgatttcagccgctttgaggtcaatggtagaaaaggaaatatcttcgtataaaaactagacagaatgattctcagaaactcctttgtgatgtgtgcgttcaactcacagagtttaacatttcttttcatagagcagttaggaaaaactctgtttgtaaggtctgcaagtggatattcagacatctttgaggctttcgttggaaacgggttttcttcatattatgctagacagaagaattctcagaaacttccttgtgttgtgtgttttcaactcacagagttgaacgatgctttacacagagtagacttgaaacactctttttgtggaatttgcaagtggagatttcagccgctttgaggtcaatggtagaataggaaatatcttcctatagaaactagacagaacgattctcagaaactcctttgtgatgtgtgcgttcaactcacagagtttaacctttcttttcatagagcaattaggaaacactctgtttgtaaagtctgcaagtggatattcagacctctttgaggccttcgttggaaacgggatttcttcatattctgctagacagaagaattcccagtaactttcttgtgttgtgtgtgttcaactcacagagttgaactttcatttacacagagcagatttgaaacactctttttgtggaatttgcaaatggagatttcaagcgctttgaggccaaaggcagaaaaggaaatatcttcgtataaaaactagacagaatgattctcagaaactcctttgtgatgtgtgcgttcaactcaccgagtttaacctttcttttcatagagcagttaggaaacactctgtttgtaaagtctgcaagtggatattcagacctctttgaggccttcgttggaaacggctatttttcatataaggctagacagaagaattcccagtaacttccttgtgttgtgtacattcaactcacagagttgaacgttcccttagacagagcagatttgaaacactctttttgtgcaattggcaagtggagatttcaagcgctttgaggtcaatggcagaaaaggaaatatcttcgtttcaaaactagacagaatcattcccacaaactgcgttgtgatgtgttcgttcaactcacagagtttaacctttctgttcatagagcagttaggaaacactctgtttgtaaagtctgtaagtggatactctgacatcttgtggccttcgtaggaaacgggatttcttcatattctgctagacagaagaattgtcagtaacttccttgtgttgtgtgtattcaactcacagagttgaacgatcctttacagagagcagacttgaaacactctttttgtggaatttgcaagtggagatttcagccgctttgaggtcaatagtagaaaaggaaatatcttcacagaaaaactagacagaatgattctcagaaacttctttgttatgtgagcattcaactcacagagttgaacctatcttttgattgagcagttttgaatctctcattttgcagaatctgcaaggggatatttggagccctttgcggcctatggtggaaaaggaaataccttcaaatgaaaagcacacagaagaattctcagtaacttccttgtgttctgtgtattcaactgacagagttgtactttcgtttagagagagcagatttgaaacactgtttttgtggaatttgcaagtggagatttcaagcgctttggggccaaaggcagaaaaggaaatatcttcgtataaaaactagacagaatcattctcagaaactgctctgcgatgtgtgcgttcaactctcagagtttaatttttcttttcattcagcagtttggaaacactctgtttgtaaagtctgcacgtggataacttgaccacttagaggccttcgttggaaacgggtttttttcacgtaaggctagacagaagaattcccagtaacttcattgtgttgtgtgcattcaactcacagagttgaacgttcccttagacagagcagatttgaaacactctatttatgcaatttgcaagtgtagatttcaagcgctttaaggtcaatggcagaaaaggaaatatcttcgtttcaaaactagacagaatgattctcagaaactcctttgtgatgtgtgcgttcaactcacagagtttaacctttcttttcatagagcagttaggaaacactctgtttgtaaattctgtaagtggatattctgacatcttgtggccttcgttggaaacgggatttcttcatattctgctagacagaagaattctcagtaacttccttgtgttgtgtgtattcaactcacagagttgaatgatcctttacacagaacagacttgaaacactcttgttgtggaatttgcaagtggagaattcagccgctttgaggtcaacggtagaataggaaatatcttcctatagaaactagacagaatgattatcagaaactcctttgtgatgtgtgcgttcaactcacagagtttaacctttcttttcatagagcagttaggaaacactctgtttgtaaagtctgcaagtggatattcagacatccttgaggctttcgttggaaacgggatttcttcatattctgctagaaagaagaattctcagtaacttccttgtgttgtgtgtattcaactcacagagttgaacgatcctttacacagagcagacttgaaacactctttttgtgtaatttgcaagtggagatttcagccgctttgaggtcaatggtagaaaaggaaatatcttcgtataaaaactagacagaatgattctcagaaactcctttgtgatgtgtgcgttcaactcacagaatttaacctttcttttcatagagcagttaggaaacactctgtttgtaaagtctgcaagtggatattcagacctccttgaggccttcgttggaaacgggatttcttcatattatgctagacagaagaattcccagtaacttccttgtgttgtgtgcattcaactcacagagttgaacgttcccttagacagagcagatttgaaacactctatttgtgcaatttccaagtgtagatttcaagcgctttaaggtcaacggcagaaaaggaaatatcttcgtttcaaaactagacagaatcattcccacaaacagcgttgtgatgtgttcgttcaactcacagagtttaaccctttctgttcatagagcagttaggaaacactctgtttgtaaagtctgtaagtggatattctgacatcttgtggccttcgttggaaacgggatttcttcatattctgctagacagaagaattctcagtaacttccttgtgttgtgtgtattcaactcacagagttgaacgatcctttacacagagcagacttgaaacactctttttgtggaatttgcaagtggagatttcagccgctttgaggtcaacggtagaaaaggaaatatcttcgtataaaaactagacagaatgattctcagaaactcctttgtgatgtgtgtgttcaactcacagattttaacctttcttttcatagagcagttaggaaacactctgtttgtaaagtctgcaagtggatattcagacctctttgaggtcttcgttggaaacgggtttttttcatataaggctagacagaagaattcccagtaacttccttgtgttgtgtgtgttcaactcacagagttgaactttcatttacacagagcagatttgaaacactctttttgtggaatttgcaagtggagatttcaagcgttttgaggccaaaggcagaaaaggaaatatcttcgtttcaaaactagacagaatcattctcagaaactgctctgcgatgtgtgcgttcaactctcagagtttaacttttcttttcatttagcagtttggaaacactctgtttgtaaagtctgcacgtggatattttgaccacttagaggccttcgttggaaacgggtttttttcctgtaaggctagacagaagaattcccagtaacttccttgtgttgtgtacattcatctcacagagttgaacgttcccttagacagagcagatttgaaacactctttttgtgcaattggcaagtggagatttcaagcgctttaaggtcaatggcagaaaaggaaatatcttcgtttcaaaactagacagaatcattcccacaaactgcgttgtgatgtgttcgttcaactcacagagtttaacctttgttttaatagaggagttaggaaacagtctgtttgtaaattctgtaagtggatattctgacatcttgtggccttcgttggaaacgggatttcttcatattctgctagacagaagaattctcagaaactttccttgtgttgtgtgttttcaactcacagagttgaacgatgctttacacagagtagacttgaaacactctttttgtgtaatttgcaagtggagatttcagccgctttgaggtcaatggtagaaaaggaaatatcttcgtataaaaactagacagaatgattctaagaaactcctttgtgatgtgtgcgttcaactcacagagtttaacctttcttttcatagagcagttaggaaacactctgtttgtaaagtctgcaagtggatattcagacatctttgaggctttcgttggaaacgggatttcttcatattctgctagacagaagaattctcagaaacttcgttgcgttgtgtgttttcaactcacagagttcaacgatcctttacacagagtagacttgaaacactctttttgtggaattggcagggtggagatttcagccgctttgaggtcaatggtagaaaaggaaatatcttcgtataaaaactagacagaatcattctcagaaactgctgcgtgatgtgtgcgttcaactctcagagtttaacttttcttttcattcagcggtttggaaacactctgtttgtaaagtctgcatgtggaaattttgaccacttagaggccttcgttggaaacgggtttttttcatgtaaggctagacagaagaattctcagtaacttccttgtgttgtgtgtattcaactcacagagttgaacgatcctttacacagagcagacttgaaacactctttttgtggaatttacaagtggagatttcagccgctttgaggtcaatggtagaaaaggaaatatcttcgtataaagactagacagaatgattctcagaaactcctttgtgatgtgtgcgttcaactcacagagtttaacttttcttttcatagagcagttaggaaacactctgtttgtaaagtctgcaagtggatattcagacctctttgacgccttcgttggaaacgggatttcttcatattatgctagacagaagaattctcagtaacttccttgtgttgtgtgtattcaactcacaggagttgaacgatcctttacacagagcagacttgaaacactctttttgtggaatttgcaagtggagatttcagccgctttgaggtcaatggtagaaaaggaaactatcttcatataaagactagacagaatgattctcataaactcctttgtgatgtgtgcgttcaactcacagagtttaacctttcttttcatagagcagttaggaaacactctgtttgtaaagtctgcaagtggatattcagacccctttgaggccttcgttggaaacgggatttcttcatattatgctagacagaagaattcccagtaacttccttgtgttgtgtgtgttcaactcacagagttgaactttcatttacacagagcagatttgaaacactcattttgtggaatttgcaagtggagatttcaagcgcttgtgaggccaaaggcagaaaaggaaatatcttcagtataaaaactagacagaatcattctcagaaactgctctgcgatgtgtgcgttcaactctcagagtttaacttttcttttcattcaacagtttggaaacactctgtttttaaagtctgcacgtggataacttgaccacttagaggccttcgttggaaacgggtttttttcatgtaaggctagacagaagaattcccagtaacttccatgtgttgtgtgcattcaactcacagagttgaacgttcccttagacagagcagatttgaaacactctatttgtgcaatttgcaagtgtagatttcaagcgctttaagatcaatggcagaaaaggagatatcttcgtttcaaaactagacagaatcattcccacaaactgcgttgtgatgtgttcgttcaactcacagagtttaacctttcttttcatagagcagttaggaaacagtctgtttgtcaattctgtaagtggatattgtgacatcttgtggccttcgttggaaacgggatttcttcatattctcctagacagaagaattctcagtaacttccttgtgttgtgtgtattcaactcacagagttgaacgatcctttacagagagcaggcttgaaacactctttttgtcgaatttgcaagtggagatttcagccgctttgaggtcaatggtagaataggaaatgtcttcttatagaaactagacagaatgattctcagaaaatcttttctgtgtgtgcgttcaactcacagagtttaacttttcttctcatagagcagttaggaaacactctgtttgtaaagtgtgcaagtggatattcagacctctttgaggccttcgttggaaacgggatttcttcatattatgctagacagaagaattctcagtaacttccttgtgttgtgtgtattcaactgacagagttgaactttcatttagagagagcagatttgaaacactgtttttgtggaatttgcaagtggagatttcaagtgctttggggccaaaggcagaaaacgaaatatcttcgtataaaaagtagacagaatcattctcagaaactgctctgcgatgtgtgcgttcaactctcagagtttaacttttcttatcattcagcagtttggaaacactctgtttgtaaagtctgcacgtggataatttgaccacttagaggccttcgttggaaacgggtttttttcctgtaaggctagacagaagaattcccagtaacttccttgtgttgtgtacattcaactcacagagttgaacgttcccttagacagagcagatttgaaacactctttttgtgcaattggcaagtggagatttcaagcgctttaaggtcaatggcagaaaaggaaatatcttcgtttcaaaactagacagaatcattcccacaaactgcgttgtgatgtgttcgttcatctcacagagtttaacctttcttttcgtagagcagttaggaaacagtctgtttgtaaattctgtaagtggatattctgacatcttgtggccttcgtgggaaacgggatttcttcatattctgctagacagaagaattctcagaaacttccttgtgttgtgtgtattcaactcaaagagttgaacgatcgtttacacagagcagacttgagacactctttttgtggaatttgtaagtggagatttcagccgctttgaggtcaatggtagaaaaggaaatatcttcatataaaaactagacagaatgattctcagaaacgtcctttgtgatgtgtgcgttcaactcacagagtttaacctttcttttcatagagcagttaggaaacactctgtgtgtaaagtctgcaagtggatattcagacctccttgaggccttcgttggaaacgggatttcttcatattctgctagacagaagaattgtcagtaacttccttgtgttgtgtgtattcacctcacagagttgaacgatcctttacacagagcagacttgaaacactctttttgtggaatttgcaagtggagatttcagccgctttgaggtcaatggtagaaaaggaaactatgttcgtatacagactagacagaatcattctcagaaactgctgcgtgatgtgtgcgttcaactcacagagtgtaagttttcttttcattcagcggtttggaaacactctgtttgtaaagtctgcacgtggatattttgaccacttagaggccttcgttggaaacgggattttttcatgtaaggctagacagaagaattcccagtaacttccttgtgttgtttgcattcaactcacagagttgaacgttcccttagacagagcagatttgaaacactctatttgtgcaatttgcaagtgtagatttcaagcgctttaaggtcaatggcagaaaaggaaatatcttcgtttcaaaactagacagaatcattctcagaaactgctctgcgatgtgtgcgttcaactctcagagtttaacttttcttttcattcagcagtttggaaacagtctgtttgtaaagtctgcacatggataacttgaccacttagaggccttcgttggaaacgggtttttttcatgtaaggctagacagaagaattctcagtaacttccttgtgttgtgtgtattcaactcacagagttgaacgatcctttacacagagcagacttgtaacactctttttgtggaatttgcaagtggagatttcagccactttgaagtcaaaggtagaaaaggaaataacttcctataaaaactagacagaatgattctcagaaaatcttttgtgatgtgtgcgttcaactcacagagtttaacttttcttctcatagagcagttaggaaacactctgtttgtaaagtctgcaagtgtatattcagacctctttgaggccttcgttggaaacgggatttcttcatattatgctagacagaagaattctcagtaacttccttgtgttgtgtgtattcaactcacagagttgaaggatcctttacagagagcaggcttgaaacactctttttgtcgaatttgaaagtggagatttcagccgctttgaggtcaatggtagaataggatatatcttcttatacaaactagacagaatcattctcagaaactgctctgcgaagtgtgcgttcaactctcagagtttaacttatcttttcattcagcagtttggaaacactctgtttgtaaagtctgcacgtggataatttgaccacttagaggtcttcgttggaaacgggtttttttcatgtaaggctagacagaagaattcccagtaatttccttgtgttgtgtacattcaactcacagagttgaacgttcccttagacagagcagacttgtaacactctttttgtggaatttgcaagtggagatttcagccgctttaaagtcaaaggtagaaaaggaaatatcttcctataaaaactagacagaatcattcccacaaactgcgttgtgaagtgttcgttcaactcacagagtttaacctttctgttcatagagcagttaggaaacactctgtttgtaaagtctgaaagtggatattctgacatcttgtggccttcgttggaaacgggatttctgcatattctgctagacagaagacttctcagtaacttccttgtattgtgtgtattcagctcacagagttgaacgatcctttacacagagcagacctgaaacactctttttgtggaatttgcaagtggagatttcagccgctttgaggtcaatggtagaataggaaatatcttcctatagaaactagacagaatgattctcagaaacttctttgtgatgtgtgcgttcaactcacacagtttaacctttcttttcatagagcagttaggaaacactctgtttgtaaagtctgcaagtggatattcagacctccttgaggccttcgttggaaacgggatttcttcatattatgctagacagaagaattctcagtaacttccttgtgttgtgtgtattcaactgacagagttgaactttcatttagagagagtagatttgtaacactgtttttgtggaatttgcaagtggagatttcaagcgctttggggccaaaggcagaaaaggaaatatcttcgtataaaaactagacagaatcattctcagaaactgctctgcgatgtgtgcgttcaactctcagagtttaacttttcttttcattcagcagtttggaaacactctgtttgtaaagtctgcacgtggatattttgaccacttagaggccttcgttggaaacgggtttttttcctgtaaggctaaaaagaagaattcccagtaacttccttgtgttgtgtgcattcaactcacagagttgaacgttcccttagacagagcagatttgaaacactctatttgtgcaatttgcaagtgtagatttcaagcgctttaaggtcaacggcagaaaaggaaatatcttcgtttcaaaactagacagaatgattctcagaaactcctttgtgatgtgtacgttcaacacacagagtttaacttttcttttcatagagcagttaggaaacactctgtttgtaaagtctgcaagtggatattcagacctctttgaggccttcgttggaaacgggatttcttcatattatgctagacagaagaattctcagtaacttccttctgttgtgtgtattcaactcacagagttgaacgatcctttacagagagcagacttgaaacattctttttgtggaatttgcaagtggagatttcagccgctttgaggtcaattgtagaaaaggaaatatcttcgtataaagactagacagaatgattctcagaaactcctttgtgatgtgtgcgttcaactcacagagtttaacctttcttttcatagagcagttaggaaacactctgtaaagtctgcaagtggatattcagacctccttgaggccttcgttggaaacgggatttcttcatattctgctatacagaagaattcccagtaacttccttgtgttgtgtgtgttcaactcacagtgttgaactttcatttatacagagcagattggaaacactctttttgtggaatttgcaagtggagatttcaagcgctttgaggccaaaggcagaaaaggaaatatcttcgtataaaaactagacagaaatcattctcagaaactgctgcgtgatgtgtgcgttcaactctcagagtttaacttttcttttcattcagcggtttggaaacactctgtttgtaaagtctgcatgtggaaattttgaccacttagaggccttcgttggaaacgggtttttttcatgtaaggctagacagaagaattcccagtaacttccttgtgttgtgtgcattcaagtcacagagttgaacgttcccttagacagagcagatttgaaacactctatttgtgcaatttgcaagtgtagatttcaagcgctttaaggtcaacggcagaaaaggaaatatcttcgtttcaaaactagacagaatcattcccacaaaccgcgttgtgatgtgttcgttcaactcacagagtttaacctttctgttcatagagcagttaggaaacactctgtttgtaaagtctgccagtggatattcagacctccttgaggccttcgttggaaacgggatttcttcatattctgctagacagaagaattctcagtaacttccttgtgttatgtgtattcaactcacagagttgaacgatcctttacacagagcacacttgaaacactctatttgtagaatttgcaagtggagatttcagccgctttgaggtcaatagtagaaaaggaaatatcttcgtagaaaaactagacagaatgattctcagaaactcctttgtgatgtgtgtgttcaactcacagagttcaacctttcttttcatagagcagttagtaaacactctgtttataaagtctgcaagtggatattcagacccctttgaggccttcgttggaaacgggatttcttcatattatgctagacagaagaattctcagtaacttctttgtgttgtgtgtattcaactgacagatttgaactttcatttagagagagcagatttgaaacactgtttttgtggaatttgcaagtggagatttcaagcgctttggggccaaagtcagaaaaggaaatattcttcgtataaaaactagacagaatcattctcagaaactgctctgcgatgtgtctgttcaaagctcagagtttaacttttcttttcattcagcagtttggaaacactctgtttgtaaaatctgcacgtggataacttgaccacttagaggccttcgttggaaacgggtttttttcatgtaaggctagacagaagaattcccagtaacttccttctgttgtgtacattcaactcacagagttgaacgttcccttagacagagcagatttgaaacactctttttgtgcaattggcaaatggagatttcaagcgctttaaggtcaatggcagaaaaggaaatatcttcgtttcaaaactagacagaatgattctcagaaacttctttgtgatgtgtgcgtccaactcacagagtttaacctttcttttcatagagcagttaggaaacactctgtttgtaaagtctgcaagtggataatcagacctctttgaggccttcgttggaaacgggatttcttcatactatgctagacagaagaattctcagtaacttccttgtgttgtgtgtattcaactcacagagttgaacgatcctttacacagagcagacttgtaacactctttttgtggaatttgcaagtggagatttcagccgctttgaagtcaaagttagaaaaggaaatatcttcctataaaaactagacagaatgattctcagaaactcctttgtgatgggtgctttcaactcacagagtttaacctttcttttcatagagcagttaggaaacactctgtttgtaaagtctgcaagtggatattcagacctcttagaggccttcgttggaaacgggatttcttcatattatgctagacagaagaattctcagtaacttcccttgtgttgtgtgtattcaactgacagagttgaactttcatttagagagagtagttttgaaacactgtttttgtggaatttgcaagtggagatttcaagcgctttggggccaaaggcagaaaaggaaatatcttcgtataaaaactagacagaatcattctcagaaactgctgcgtgatgtgtgcgttcaactctcagagtttaacttttcttttcattcagcggtttggaaacactctgtttgtaaagtctgcacgtggaaattttgaccacttagaggccttcgttggaaacgggtttttttcatgtaaggctagacagaagaattcccagtaacttccttgtgttgtgtgcattcaactcacagagttgaacgttcccttagacagagcagatttgaaacactctatttgtgcaatttgcaagtgtagatttcaagcgctttaaggtcaaaggcagaaaaggaaatatcttcgtttcaaaactagacagaatcattcccacaaactgcgttgtgatgtgttcgttcaactcacagagtttaacctttctgttcatagagcagttaggaaacactctgtttgtaaagtctgtaagtggatattctgacatcttgtggccttcgttggaaacgggatttcttcatatttcgctagacagaagaattctcagtaacttccttgtgttgtgtgtattcaactcacagagttgaacgatcctttacactgagcagacttgaaacattctttttgtggaatttgcaagtggagatttcagccgctttgaggtcaatggtagaataggaaatatcttcctatagaaactagacagaacgattctcagaaactcctttgtgatgtgtgtgttcaactcacagagtttaacctttcttttcatagagcagttaggaaacactctgtttgtaaagtctgcaagtggatattcagacctctttgaggccttcgttggaaacgggatttcttcatattctgctagacagaagaattctcagtaacttccttgtgttgtgtttattcaactgacagagttgaactttcatttagagagagcagatttgaaacactgtttttgtggaatttgcaagtggagatttcaagcgctttggggccaaaggcagaaaacgaaatatcttcgtataaaaactagacagaatcattctcagaaactgctgcgtgatgtgtgcgttcaactctcagagtttaacttttcttttcattcagcggtttggaaacactctgtttgtaaagtctgcacgtggatattttgaccacttagaggccttcgttggaaacgggttttttgcatgtaaggctagacagaaagaattcccagtaacttccttgtgttgtgtgcattcaactcacagagttgaacgttcccttagacagagcagatttgaaacactctatttgtgcaatttgcaagtgtagatttcaagcgctttaaagtcaatggcagaaaaggaaatatcttcgtttcaaaactagacagaatgattctcagaaactcctttgtgatgtgtgtgttcaactcacagagtttaactttccttttcatagagcagttaggaaacactctgtttgtaaagtctgcaagtggatattcagacctctttgaggccttcgttggaaacgggatttcttcatattatgctagacagaagaattctcagtaacttccttgtgttgtgtgtattcaactcacagagttgaacgatcctttacacagagcagacttgaaacagtctttttgtggaatttgcaagtggagatttcagccgctttgaggtcaatggtagaaaaggaaatctcttcgtataaagactagacagaatgattctcagaaactcctttgtgatgtgtgcgttcaactcacagagtttaacctttcttttcatagagcagttaggaaacactctgtttgtaaagtctgcaagtggatattcagacctccttgaggccttctttggaaacgggatttcttcttattctgctaggcagaagatttcccagtaacttccttgtgttgtgtgtgttcaactcacagagttgaactttcatttacacagagcagatttggaacactctttttgtggaatttgcaaatggagatttcaagcgctttgaggccaaaggcagaaaaggaaatatcttcgtataaaaactagacagaatcattctcagaaactgctgcgtgatgtgtgcgttcaactctcagagtttaacttttcttttcattcagcgctttggaaacactctgtttgtaaagtctgcacgtggaaattttgaccacttagaggccttcggttggaaacgggtttttttcatgtaaggctagacagaagaattcccagtaacttccttgtgttgtgtgcattcaactcacagagttgaacgttcccttagacagagcagatttgaaacactctatttgtgcaatttgcaagtgtagatttcaagcgctttaaggtcaatggcagaaaaggaaatatcttcgtttcaaaactaggcagaatcattcccacaaactgcgttgtgatgtgtttgttcaactcacagagtttaacctttcttttcatagagcagttaggaaacagtctgtttgtaaattctgtaagtggatattctgacatcttgtggccttcgttggaaacgggattacttcatattctgctagacagaagaattctcagtaacttccttgtgttttgtgtattcaactcacagagttgaacgatcatttacacaaagcagacttgaaacacactttttgtggaatttgcaagtggagatttaagccgctttgaggtcaatggtagaataggaaatatcttcctatagaaactagacagaatgattctcagaaactcctttgtgatgtgtgcgttcaactcacagagttcaacctttcttttcatagagcagttgggaaacactctgtttgtaaagtctgcaagtggatattcagacttctttgaggtcttcgttggaagcgggatttcttcatattctgctagacagaagaattctcagtaacttccttgtgttgtgtgtattcaactgacagagttgaactttcatttagagagagtagatttgaaacactgtttttgtggaatttgcaagtggagatttcaagcgctttggggccaaaggcagaaaaggaaatatcttcatataaaaactagacagaatcattctcagaaaactgctgcgtgatgtgtgcgttcaactctcagagtttaacttttcttttcattcagcggtttggaaacactctgtttgtaaagtctgcacgtggaaattttgaccacttagaggccttcgttggaaacgggtttttttcatgtaaggctagacagaagatttcccagtaaattccttgtgttgtgtacattcaactcacagagttgaacgttcccttagacagagcagatttgaaacactctttttgtgcaattggcaagtggagatttcaagcgctttaaggtcaatggcagaaaaggaaatatcttcgtttcaaaactagacagaatcattcccacaaactgcgttgtgatgttttcgttcaactcacagagtttaacctttccgttcatagagcagttaggaaacacactgtttgtaaagtctgtaagtggatattctgacatcttgtggccttcgttggaaacgggatttctttatattctgctagacagaagaattctcagaaacttccttgtgttgtgtgttttcaactcacagtgttgaacgatcctttacacagagcagacttgaaacactctttttgtgggatttgcaagtggagatttcagccgctttgaggtctatggtagaaaaggaaatatcttcgtataaaaactagacagaatgattctcagaaactcctttgtaatgtgtgcgttcaactcacagagtttaacgtttcttttcatagagcagttaggaaacactctgtttgtaaagtctgcaagtggatattcagacctctttgaggccttcgttggaaacgggtttttttcatataaggctagacagaagaattctcagtaacttccttgtgttgtgtgtattcagctgacagagttgaactttcatttagagagagcagatttgaaacactgtttttgtgtaatttgcaattggagatttcaagcgctttggggccaaaggcagaaaaggaaatatcttcgtataaaaactagacagaatcattctcagaaactgctgcgtgatgtgtgcgttcaactctcagagtttaacctttcttttcattcagcggtttggaaacactctgtttgtaaagtctgcacgtggatattttgaccacttagaggccttcgttggaaacgggtttttttcatgtaaggctagacagaagaattcccagtaacttccttgtgttgtgtacattcaactcacagagttgaactgttcccttagacagagcagatttgaaacactctttttgtgcaattggcaaatggagatttcaagcgctttaaggtcaatggcagaaaaggaaatatcttcgtttcaaaactagacagaatcattctcagaaactgctctgcgatgtgtgcgttgaactctcagagtttaacttttcttttcattcagcagtttggaaacactctgtttgtgaagtctgcacgtggatattttgaccatttagaggccttcgttggaaacgggtttttttcctgtaaggctagacagaagaattcccagtaacttccttgtgttgtgtacattcaactcacagagttgaacgttcccttagacagagcagacttgtaacactctttttgtggaatttgcaagtggagatttcagccgctttcaagtcaaaggtagaaaaggaaatatcttcctataaaaactagacagaatgattctcagaaactcctttgagatgtgtgcgctcaactcacagagtttaacctttcgtttcatagagcagttaggaaacactctgtttgtaaagtctgcaagtggatattcagacctctttgaggccttcgttggaaacgggtttttttcaaataaggctagacagaagaattctcagtaacttccttgtgttgtgtgtattcaactgacagagttgaactttcatttagagagagcagatttgaaacactgtttttgtggaatttgcaaatggagatttcaagcgctttggggccaaaggcagaaaaggaaatatcttcgtataaaaactagacagaatcattctcagaaactgctctgcgatgtgtgcgttcaactctcagagtttaacttttcttttcattcagcagtttggaaacactctgtttgtaaagtctgcacgtggatattttgaccacttagaggccttcgttggaaacgggttattttcctgtaaggctagacagaagaattcccagtaacttccttgtgttgtgtgcattcaactcacagagttgaacgttcccttagacagagcagatttgaaacactctatttgtgcaatttgcaagtgtagatttcaggcgctttaaggtcaacggcagaaaaggaaatatcttcgtttcaaaactagacagaatgattctcagaaactcctgtgtgaagtgtgtgttcaactcacagagtttaacctttctattcatagagtagttaggaaacactctgtttgtaaagtctgcaagtggatattttgacctctttgaggccttcgttggaaacgggtttttttcatgtaaggctagacagaagaattctcagtaactttccttgtgttgtgtgtattcaactcacagagttgaacgatcctttacacagagcagacttgtaacactctttttgtggaatttgcaaggggagatttcagccgctttgaagtcaaaggtagaaaaggaaatatcttcctataaaaactagacagaatgattctcacaaactcctttgtgatgtgtgcgttcaactcacagagtttaacctttcttttcatagagcagttaggaaacactctgtttgtaaagtctgcaagtggatattcagacctccttgaggccttcgttggaaacgggatttcttcatattctgctagacagaagaattcccagtaacttccttgtgttgtgtgtgttcaactcacagagttgaactttgatttacacagagcagatttgaaacactctttttgtggaatttgcaagtagagatttcaagcgctttgaggccaaaggcagaaaaggaaatatcttcgtataaaaactagacagaatcattctcagaaactgctctgcgatgtgtgcgttcaactctcagagtttaacttttcttttcattcagcagtttggaaacactctgtttgtaaagtctgcacgtggatattttgaccacttagaggccttcgttggaaacgggtttttttcctgtaaggctagatagaagaattcccagtaacttccttgtgttgtgtacattcaactcacagagttgaacgttcccttagacagagcagatttgaaacactctttttgtgcaattagcaagtggagatttcaagcgctttaaggtcaatggcagaaaaggaaatatcttactttcaaaactagacagaatgattctcagaaactcctttgtgatgtgtgcgttcaactcaaagagtttaacttttcttttcacagagcagttaggaaacactctgtttgtaaagtctgcaagtggatattcagacctatttgaggccttcgttggaaacgggatttcttcatattatgctagacagaagaattctcagtaacttccttgtgttgtgtgtattcaaatcacagagttgaacgatcctttacacagagcagacttgaaacattctttttgtggaatttgcaagtggagatttcagccgctttgaggtcaatggtagaataggaaatatcttcctatagaaactagacagaatgattctcagaaactcctttgtgatgtgtgcgttcaactcacagagtttaacctttcttttcatagagcagttaggaaacaatctgtttgtaaagtctgcaagtggatattcagacctctttgaggccttcgttggaaacgggtttttttcatataaggctagacagaagaattcccagtaacttccttgtgttgtgtgtgttcaactcacagagttgaactttcatttacacagagcagatttgaaacactctttttgtggaatttgcaagtggggatttcaagcgctttgaggccaaaggcagaaaaggaaatatcttcgtataaaaactagacagaatcattctcagaaaccgctctgtgatgtgtgcgttcaactctcagagtttaacttttcttttcatttagcagtttggaaactctcgggttgtaaagtctgcacgtggatattttgaacacttagaggccttcgttggaaacgggtttttttcatgtaaggctagacagaaaaattcccagtaacttccttgtgttgtgtgcattcaactcacagagatgaacgttcccttcgacagagcagatttgaaacactctatttgtgcaatttgccagtgtagatttcaagcgctttaaggtcaatggcagaaaaggaaatatcttcgtttcaaaactagacagaacgattctcagaaactcctttgtgatgtgtgcgttcaactcacagagtttaacctttcttttcatagaacagttaggaaacactctgtttgtaaagtctgcaagtggatattcagacctctatgaggccttcgttggaaacgggatttcttcatattctgctagacagaagaattctcagtaacttccttgtgttgtgtgtattcaactcacagagttgaacgatcctttacacagagcagacttgaaacactctttttgtggaatttgcaagtggaggtttcagccgctttgaggtcaatagtagaaaaggaaatatcttcgtagaaaaactagacagaatgattctcagaaactcctttgggatgtgtgcgttcaactcacagagtttaacctttctgttcatagagcagttaggaaacactctgtttgtaaagtctgcaagtggatattcagacctccttgaggccttcggtggaaacgggatttcttcatattctgctagacagaagaattcccagtaacttccttgtgttgtgtgtgttcaactcacagagttgaactttcatttacacagagcagatttgaaacactctttttgtggaatatgcaagtggagatttcaagcgctttgaggccaaaggcagaaaaggaaatatcttcgtttcaaaactagacagaatcattctcagaaactgctctgcgatgtgtgcgttcaactctcagagtttaacttttcttttcattcagcagtttggaaacactctgtttgtaaagtctgcacgtggataatttgaccacttagaggccttcgttggaaacggtttttttcatgtaaggctagacagaagaattctcagtaacttccttgtgttgtgtgtattcaactcacagagttgaacgatcctttacacagagcagacttgtaacactctttttgtggaatttacaagtggagatttcagccgctttgaagtcaaaggtagaaaaggaaatatcttcctataaaaactagacagaatcattcccacaaactgcgttgtgatgtgttcgttcaactcacagagtttaacctttcttttcatagagcagttaggaaacagtctgtttgtcaattctgtaagtggatattctgacatcttgtggccttcgttggaaacaggatttcttcatattctgctagacagaaagaattctcagtaacttccttgtgttgtgtgtattcaactcacagagttgaacgatcctttacacagagcagacttgaaacactctttttgtggaatttgcaagtggagatttcagccgctttgaggtcaatagtagaaaaggaaatatcttcgtagaaaaactagacagatgattctcagaaactcctttgtgatgtgtgcgttcaactcacagagtttaacctttcttttcatagagcagttaggaaacactctgtttgtaaactctgcaagtggatattcagacctctttgaggccttcgttggaaacgggttttcttcatattatgcctgacagaagaattcccagtaacttccttgtgttgtgtgtgttcaactcacagagttgaactctcatttacacagagcagatttgaaacactctttttgtggaatttgcaagtggagatttcaagcgctttgaggccaaagacagaaaaggaaatatcttcgtataaaaactagacagaatcattctcagaaactgctctgcgatgtgtgcgttcaactctcagagtttaacttttcttttcattcagcagtttggaaacactctgtttgtaaagtctgcacgtggatattttgaccacttagaggccttcgttggaaacgggtttttttcctgtaaggctagtcagaagatttcccagtaacttccttgtgttgtgtacattcaactcacagagttgaacgttcccttagacagagcagatttgaaacactctttttgtgcaattggcaaatggagatttcaagcgctttaaggtcaatggcagaaaaggaaatatcttcgtttcaaaactagacagattcattcccacaaactgcgttgtgatgtgttcgttcaactcacagagtttaacctttctgttcatagagcagttaggaaacactctgtttgtaaagtctgccagtggatattcagacctccttgaggccttcgttggaaacgggatttcttcatattctgctagaaagaagaattctcagtaacttccttgtgttgtgtgtattcaactcacagaattgaacgatcctttacacagagcagacttgaaacattctttttgtggtatttgcaagtggagatttcagccgctttgaggtcaatggtagaataggaaatatcttcctatagaaactagacagaatgattctcagaaactcctttgtgatgtgtgcgttcaactcacagagtttaacctttcttttcatagagcagttaggaaacactctgtttgtaaactctgcaagtggatattcagacctctttgaggccttcgttggaaacgggatttcttcatactgtgctagacagaagaattctcagtaacttccttgtgttgtgtgtattcaactcacagagttgaacgatcctttacacagagcagacttgaaacactcttcttgtggaatttgcaagtggagatttcagccgcgttgaggtcaatggtagaaaaggaaatatcttcgtataaaaactagacagaatcattctcagaaactgctctgtgatgtgtgcgttcaactctcagagtttaacttttcttttcattcagcagtttggaaacactctgtttgtaaagtctgcacgtggatattttgaccacttagaggccttcgttggaaacgggttttttcatgtaaggctagacagaagaattcccagtaacttccttgtgttgtgtacattcaactcacagagttgaacgttcccttagacagagcagatttgaaacactctttttgtgcaattggaaagtggagatttcaagcgctttaaggtcaatggcagaaaaggaaatatctccgtttcaaaactagacagaatcattcccacaagctgcgttgtgatgtgttcgttcatctcacagagtttaacgtttcttttcatagagcagttaggaaacagtctgtttgcaaattctataagtggatattctgacatcttgtggccttcgttggaaacgggatttcttcatattctgctagacagaagaattctcagtaacttccttgtgttgtgtgtattcaactcacacagttgaacgatcctttacacagagcagacttgaaacactctttttgtggaatttgcaagtggagatttcagccgctttgaggtcaacagtagaaaaggaaatatcttcgtagaaaaactagacagaatgattctcagaaactcctttgtgatgtgtgcgttcaactcacagagtttaacctttcttttcatagatcagttaggaaacactctgtttgtaaagtctgcaagtgaatattcagacatccttgaggctttcgttggaaacgggatttcttcatattctgctagaaagaagaattcccagtaacttccttgtgttgtgtgtgttcaactcacagagttgaactttcatttacacagagcagatttgaaacagtctttttgtggaatttgcaaatggagatttcaagcgctttgaggtcaaaggcagaaaaggaaatatcttcgtataaaaactagacagaatcattctcagaaactgctgcgtgatgtgtgcgttcaactctcagagtttaacttttcttttcattcagcggtttggaaacactctgtttgtaaagtctgcacgtggatattttgtccacttagaggccttcgttggaaacgggtttttttcatgtaattctagacagaagaattcccagtaacttccttgtgttgtgtgcattcaactcacagagttgaacgttcccttagacagagcagatttgaaacactctatttgtgcaatttgcaagtgtagttttcaagctctttaaggtcaacggcagaaaaggaaatatcttcgtttcaaaactagacagaatcattcccacaaactgcgttgtgatgtgttcgttcaactcacagagtttaacctttctgttcatagagcagttaggaaacactctgtttgtaaagtctgcaagtggatattcagacctctttgtggccttcgttggaaacgggatttcttcatattatgctagacagaagaattctcagtaacttccttgtgttgtgtgtattcaactcacagagttgaacgatcctttacacagagcagacttgtaacactctttttgtggaatttgcaagtggagatttcagccgctttgaagtcaaaggtagaaaaggaaatatcttcctataaaactagacagaatgattctcagaaactcctttgtgatgtgtgcgttcaactcacacagtttaaccttccttttcatagagcagttaggaaacactctgtttgtaaagtctgcaagtggatattcagacctctttgaggccttcgttggaaacgggtttttttcatataaggctagacagaagaattctccgtaacttccttgtgttgtgtgtattcaactgacagagttgaactttcatttagagagatcagatttgaaacactctatttgtgcaatttgcaagtgtagatttcaagcgcattaaggtcaatggcagaaaaggaaatatcttcgattcaaaactagacagaatcattctcagaaactgctctgcgatgtgtgcgttcaactctcagggtttaacttttcttttcattcagcagtttggaaacactctgtttgtaaagtctgcacgtggatattttgaccacttagaggccttcgttggaaacgggttttcttcctgtaaggctagacagaagaattctcagtaacttccttgtgttgtgtacattcaactcacaagagttgaacgttcccttagacagagcagatttgaaacactctttttgtgcaattggcaagtggtgatttcagccgctttgaggtcaatggtagaaaaggaaatatcttcgtataaaaactagacagaatcattcccagaaactgcgttgtgatgtgttcgttcaactcacagagtttaacctttcttttcatagagcagttaggaaacagtctgtttgtcaattctgtaagtggatattctgacatcttgtggcgttcgttggaaacgggatttcttcatattctgctagacagaagaattctcagtaacttccttgtgttgtgtgtattcaactcacagagttgaacgatcctttacacagagcagacttgaaacactctttttttggaatttgcaagtggagatttcagccgctttgaggtcaatggtagaaaaggaaactatcttcatataaagactagacagaatgattctcagaaacttctttgtgatgtgtgcgttcaactcacagagtttaacctttcttttcatagagcagttaggaaacactctgtttgtaaagtctgcaagtggatattcagacctctttgaggccttcgttggaaacgggatttcttcatactatgctagacagaagaattctcagtaacttccttgtgttgtgtgtattcaactcgcagagttgaacgatcctttacacagagcagacttgtaacactctttttgtggaatttgcaagtggagatttcagccgctttgaagtcaaaggtagaaaaggaaatatcttcctataaaaactagacagaaatcattctcagaaactgctgcgtgatgtgtgcgttcaactctcagagtttaacttttcttttcattcagcggtttggaaacactctgtttgtaaagtctgcacgtggatattttgaccacttagaggccttccttggaaacgggtttttttcatgtaaggctagacagaagaattcccagtaacttccttgtgttgtgtgcattcaactcacagagttgaacgttcccttagacagagcagatttgaaacactctatttgtgcaatttgcaagtgtagatttcaagcgctttaaggtcaacggcagaaaaggaaatatcttcgtttcaaaactagacagaatgattctcagaaactcctttgtgatctgtgcgttcaactcacagagtttaacttttcttttcatagagcagttaggaaacactctgtttgtaaagtctgcaagtggatattcagagctctttgaggccttcgttggaaacgggatttcttcatattctgctagacagaagaattctcagtagcttccttgtgttgtgtgtattcaactcacagagttgaacgatcctttacagagagcagacttgaaacactctttttgtggaatttgcaagtggagatttcagccgctttgaggtcaatggtagaataggaaatatcttcctatagaaactggacagaatgattctcagaaactcctttgtgatgtgggcgttcaactcacagagtttaacctttcttttcatagagcagttaggaaacactctgtttgtaaagtctgcacgtggatatttggacttctttgaggccttcgttggaaacggttttttttcatgtaaggctagacagaagaattctcagtaactttccttgtgttgtgtgtattcaactgacagagttgaactttcatttagagagagctgatttgaaacactgtttttgtggaatttgcaagtggagatttcaagcgctttggggccaaaggcagaaaaggaaatatctttgtataaaaactagacagaagcattctcagaaactgctctgcgatgtgtgcgttcaactctcagagtttaacttttcttttcattcagcagtttggaaacactctgtttgtaaagtctgcacgtggataatttgaccacttagaggccttcgttggaaacgggtttttttcatgtaaggctagacagaagaattcccagtaacttccttgtgttgtgtacattcaactcacagagttgaacgttcccttagacagagcagatttgaaacactctttttgtgcaattggcaagtggagatttcaagcgctttaaggtcaatggcagaaaaggaaatatcttcgtttcaaaactagacagaatcattcccacaaactgcgttgtgatgtgttcgttcaactcacagagtttaacctttcttttcatagagcagttaggaaacagtctgtttgtcaattctgtaagtggatattcagacctctttgaggccttcgttggaaacgggatttcttcatactatgctagacagaggaattctcaggaacttccttgtgttgtgtgtattcaactcacagagttgaacgatcctttacacagagcagacttgaaacactcttttggtggaatttgcaagtggagatttcagccgctttgagttcaatggtagaataggaaatatcttcctatagaaactacacagaatgattctcagaaactgctttgtgatgtgtgcgttcaactcacagagttcaacctttcttttcatagagcagttgggaaacactctgtttgtaaagtctgcaagtggatattcagacttctttgaggccttcgttggaagcgggatttcttcatgttctgctagacagaagaattcccagtaacttccttgtgttgtgtgtgttcaactcacagagttgaactttcatttacacagagcagatttgaaacactctttttgtggaatttgcaggtggagatttcaagcgctttgaggccaaaggccgaaaaggaaatatcttcgtataaaaactagacagaatcattctcagaaactgctctgcgatgtgtgcgttcaactctcagagtttaactttgcttttcattcagcagtttggaaacactctgtttgtaaagtctgcacgtggataatttgaccacttagaggccttcgttggaaacgagtttttttcatgtaaggttagacagaagaattctcagtaacttccttgtgttgtgtacattcaactcacaagagttgaacgttcccttagacagagcagatttgaaacactctttttgtgcaattggcaagtggtgatttcagccgctttgaggtcaatggtagaaaaggaaatatcttcgtataaaaactagacagaatgattctcagaaactcctttgtgatgtgtgcgttcaactcacagagttcaacctttcttttcatagagcagttgggaaacattctgtttgtaaagtctgcaagtggatattcagacttctttgaggccttcgttggaagcgggatttcttcatattctgctagacagaagaattctcagaaacttccttgtgttgtgtgttttcaactcacagagttgaacgatcctttacacagagcagacttgaaacactccttttgtggaatttgcaagtggagatttcagccgctttgaggtcaatggtagaataggaaatatcttcctatagaaactagacagaatgattctcagaaactcctttgtgatgcgtgcgttcaactcacagagtttaacttttcttttcatagagcagttaggaaacactctgtttgtaaaggctgcaagtggatattcagacccctttgaggccttcgttggaaacgggatttcttcatattatgcgagacagaagaattctcagtaacttccttgtgttgtgtgtattcaactcacagagttaaacgatcctttacacagagcagacttgaaacactctttttgtggaatttgcaagtggagatttcagccgctttgaggtcaatagtagaaaaggaaatatcttcgaagaaaaactagacagaatcattctcagaaactgctctgcgatgtgtgcgttcaactctcagagtttaacttttcttttcattcagcagtttggaaacactctgtttgtaaagtctgcacgtggatattttgaccacttagaggccttcgttggaaacgggtttctttcctgtaaggctagacagaagaattcccagtaacttccttgtgttgtgcgcattcaactcacagagttgaacgttcccttagacagagcagatttgaaacagcctatttgtgcaatttgcaagtgtacatttcaagcactttaaggtcaacggcagaaaaggaaatatcttcgtttcaaaactagacagaatgattctcagaaactcctttgtgatgtgtgcgttcaactcacagagtttaacctttcttttcacagagcagttaggaaacactctgtttgtaaagtctgcaagtagatattcagacctctttgaggccttcgttggaaaagggatttcttcatattatgctagacagaagaattctcagaaacttccttgtgttgtatgtattcaactcacagagttgaacgatcctttacacacagcagacttgaaacactctttttgtggaatttgcaagtggagatttcagccgctttgtgttcaatggtagaaaaggaaatatcttcgtataaaaactagacagaatgattctcagaaactcctttgtgatgtgtgcgttcaactcacagagtttaacctttcttttcatagagcagttgggaaacactctgtttgtaatgtctgcaagtggatattcagacatccttgaggctttcgttggaaacgggatttcttcatattctgctagaaagaagaattctcagtaacttccttgtgttgtgtgtattcaactgacagagttgaactttcatttagagagagcagatttgaaacactgtttttgtggaatttgcaagtggagatttcaagcgctttggggccaaaggccgaaaaggaaatatcttcgtataaaaactagacagaatcattctcagaaactgctgcgtgatgtgtgcgttcaactctcagagtttaacttttcttttcattcagcggtttggaaacactctgtttgtaaagtctgcacgtggatattttgaccacttagaggccttcgttggaaacgggtttttttcatgtaaggctagacagaagaattcccagtaacttccttgtgttgtgtacattcaactcacagagttgaacgttcccttagacagagcagatttgaaacactctttttgtgcaattggcaagtggagatttcaagcgctttaaggtcaatggcagaaaaggaaatatcttcgtttcaaaactagagagaatgattctcatgaactcctttgtgatgtgtgcgttcaactcacagagtttaacctttgttttcatagagcagttaggaaacactctgtttgtaaagtctgcaagtggatattcagacctccttgaggccttctttggaaaagggatttcttcatattctgctagacagaagaattctcagtaacttccttgtgttgtgtgtattcaactcacagagttgaatgatcctttacacagagcagacttgaaacactctttttgtggaaattgcaagtggagatttcagccgctttgaggtcaatggtagaaaagtaaatatcttcgtataaagactagacagaatgattctcagaaactcctttgtgatgtgtgcgttcaactcacagaatttaacatttcttttcatagagcagttaggaaacactctgtttgtaaagtctgtaagtggatattcagacctctttgaggccttcgttggaaacgggatttcttcgtattctgctggacagaagaattctcagtaacttcccttgtgttgtgtgtattcaactgacagagttgaactttcatttagagagagcagatttgaaacactgtttttgtggaatttgcaagtggagatttcaagcgcttcggggccaaaggcagaaaaggaaatatcttcgtataaaaactagacagaatcattctcagaaactgctgcgtgatgtgtgcgttcaactctcagagtttaacttttcttttcattcagcggtttggaaacactctgtttgtaaagtctgcacgtggatattttgaccacttagaggccttctttggaaacgggtttttttcatataaggctagacagaagatttcccattaaattccttgtgttgtgtacattcaactcacagagttgaacgttcccttagacagagcagatttgaaacactctttttgtgcaattggcaagtggagatttcaagcgctttaaggtcaatggcagaaaaggaaatatcttcgtttcaaaactagacagaatcattcccacaaactgcgttgtgatgtgttcgttcaactcacagagtttaacctttccgttcatagagcggttaggaaacactctgtttgtaaagtctgtaagtggatattctgacatcttctggccttcgttggaaacgggatttcttcatattctgctagacagaagaattctcaagtaacttccttgtgttgtgtgtattcaactcacagagttgaacgatcctttacacagagcagacttgtaacactctttttgtggaatttgcaagtggagatttcagccgctttgaagtcaaaggtagaaaaggaaatatcttcctataaaaactagacagaatgatcctcagaaactcccttgtgatgtgtgcgttcaactcacagactttaaactttcttttcatagagcagttaggaaacactctgtttgtaaagtctgcaagtggatattcagacctccttgaggccttcgttggaaacgggatttcttcatattatgctagacagaagaattctcagtaacttccttgtgttgtgtgtattcaactgacagagttgaactttcatttagagagagcagatttgaaacactgtttttgtggaatttgcaagtggagatttcaagcgctttggggccaaaggcagaaaaggaaatatcttcgtatgaaaactaggcagaatcattctcagaagctgctgcgtgatgtgtgcgttcaactctcagagtttaacttttcttttcattcagcggtttggaaacactctgtttgtgaagtctgcacgtggatattttgaccacttagaggccttcgttggaaacgggttttttgcatgtaaggctagacagaagaattcccagtaacttccttgtgttgtgtgcattcaactcacagagttgaacgttcccttagacagagcagatttgaaacactctatttgtgcaatttgcaagtgtagatttcaagcgctttaaggtcaatggcagaaaaggaaatatcttcgtttgaaaaatagacagaatcattcccacaaactgcgttgtgatgtgttcgttcaactcacagagtttaacttttcttttcatagagcagttaggaaacactctgtttgtaaagtctgtaagtggatattcagacctctttgaggccttcgttggaaacgggatttattcatattctgctagacagaagaattctcagtaactgccttgtgttgtgtgtattcaactcacagagttgaacgatcctttacacagagcagacttgaaacactctttttgtggaatttgcaaggggagatttcagccgctttgaggtcaatggtagaataggaaatatcttcctatagaaactagacagaatgattctcagaaactcctttgtgatgtgtgcgttcaactcacagagtttaacctttcttttcatagagcagttaggaaacactctgtttgtaaagtctgcaagtggatattcagacctctttgaggccttcgttggaaacgggatttcttcatataaaatctagacagaagaattcccagtaacttccttgtgttgtgtgtgttcaactcacagagttgaactttcatttacacagagcagatttgaaacactctttttgtggaattcgcaagtggagatttcaagcgctttgaggccaaaggcagaaaaggaaatatcttcgtttcaaaactagacagaatcattctcagaaactgctgcgtgatgtgtgcgttcaactctcagagtttaacttttcttttcattcagcggttttgaaacactctgtttgtaaagtctgcacgtggatattttgaccacttagaggccttcgttggaaacgggtttttttcatgtaaggctagacagaagaattcccagtaacttccttgtgttgtgtgcattcaactcacagagttgaacgtttccttagacagagcagatttgaaacaatctatttgtgcaatttgcaagtgtagatttcaagcgctttaaggtcaatggcagaaaaggaaatatcttcgtttcaaaactagacagaatcattcccacaaactgcgttgtgatgtgtgcgttcaactcaaagagtttaacctttcttttcatagagcagttaggaaacactctgattgtaaagtctgcaagtggatattcagacctccttgaggccttcgttggaaacgggatttcttcatattctgctagacagaagaattctcagtaactatcttgtgttgtgtgtattcaactcacagagttcaacgatcctttacacagagcagacttgaaacactctttttgtggaatttgcaagtggagatttcagccgctttgaggtcaatggtagaataggaaatatcttcccatagaaactagacagaatgattctcagaaactcctttgtgatgtgtgcgttcaactcacagagttcaacctttgttttcctagagcagttgggaaacactctgtttgtaaagtctgcaagtggatattcagacttctttgaggccttcgttggaagcgggatttcttcatgttctgctggacagaagaattcccactaacttccttgtgttgtgtgtgttcaactcacagagttgaactttcatttacacagagcagatttgaaacactctttttgtggaatttgcaagtggagatttcaagcgctgtgaggccaaaggcagaaaaggaaatatcttcgtataaaaactagacagaatcattctcagaaactgctctgcgatgtgtgcgttcaactctcagagtttaacttttcttttcattcagcagtttggaaacactctgtttgtaaagtctgcacgtggatattttgaccacttagaggccttcgttggaaacgggtttttttcctgtaaggcatagacagtagaattcccagtaacttccttgtgttgtgtacattcaactcacagagttgaacgttcccttagacagagcagatttgaaacactctttgtgcaattggcaagtggagatttcaagcgctttaaggtcaatggcagaaaaggaaatatcttcgtttcaaaactagacagaatcattcccacaaactgcgttgtgatgtgttcgttcaactcacagcagtttaacctttctgttcatagagcagttaggaaacactctgtttgtaaagtctgtaagtggatattctgacatcttgtggccttcgttggaaacgggatttcttcattttctgctagacagaagaattctcagtaactgccttgtgttgtgtgtattcaactcacagagttgaacgatcctttacacagagcagacttgaaacaatctttttgtggaatttgcaagtggagatttcagccactttgaggtcaatggtagaataggaaatatcttcctatagaaactagacagaatgattctcagaaactcctttgtgatgtgtgtgttcaactcacagagtttaacctttcttttcatagagcagttagtaaacactccgtttataaagtctgcaagtggatattcagacccctttgaggccttcgttggaaacgggatttcttcatattatgctagacagaagaattcccagtaacttccttgtgttgtgtgtgttcaactcacagagttgaactttcatttacacagagcagatttgaaacactctttttgtggaatttgcaggtggagatttcaagcgctttgaggccaaaggcagaaaaggaaatatcttcgtataaaaactagacagaaatcattctcagaaactgctctgcgatgtgtgcgttcaactctcagagtttaacttttcttttcattcagcagtttggaaacactctgtttgtaaagtctgcacgtggataatttgaccacttagaggccttcgttggaaacgggtttttttcatgtaaggctagacagaagaattcccagtaacttccttgtgttgtgtacattcaactcacagagttgaacgttcccttagacagagcagatttgaaacactctttttgtgcaattggcaagtggagatttcaagcgctttaaggtcaatggcagaaaaggaaatatcttcgtttcaaaactagacagaatgattctgagaaactcctttgtgatatgtgcgttcaactcacagagtttaacctttcttttcatagagcagttaggaaacactctgattgtaaagtctgcaagtggatattcagacctccttgaggccttcgttggaaacgggatttcttcctattatgctagacagaagaattctcagtaacttccttgtgttgtgtgtattcaactcacagagttgaatgatcctttacacagagcagacttgaaacactctttttgtggaatttgcaagtggagatttcagccgctttgagttcaatggtagaataggaaatatcttcctatagaaactagacagaatgattctcagaaactcctttgtgatgtgtgcgttcaactcacagagtttaacctttcttttcatagagcagttaggaaacactctgtgtgtaaagtttgcaagtggatattcagacctctttgaggccttcgttggaaacgggtttttttcatataaggttagacagaagaattctcagtaacttccttgtgttgtgtgtattcaactcacagagttgaatgatcctttacacagaacagacttgaaacactctttttgtggaatttgcaagtgcagatttcagccgctttgaggtcaagggtagaaaaggaaatatcttcgtacaaaaactagacagaatcattctcagaaactgctgcgtgatgtgtgcgttcaactctcagagtttaacttttcttttcattcagcggtttggaaacactctgtttgtaaagtctgcacgtggaaattttgaccacttagaggccttcgttggaaacgggtttttttcatgtaaggctagacagaagaattcccagtaacttccttgtgttgtgtgcattcaactcacagagttgaacgttcccttagacagagaagatttgaaacactctatttgtgcaatttgcaagtgtagatttcaagcgctttaaggtcaacggcagaaaaggaaatatcttcgtttcaaaactagacagaatcattaccacaaactgcgttgtgatgtgttcgttcaactcacagagtttaacctttctcttcatagagcagttaggaaacactctgtttgtaaagtctgcaagtggatattcagacctccttgaggccttcgttggaaacgggatttcttcatattatgctagacagaagaattcctcagtaacttccttgtgttgtgtgtattcaactcacagagttgaatgatcctttacacagagcagacttgaaacactctttttgtggaatttgcaagtggagatttcagccgctttgaggtcaatggtagaataggaaataacttcctatagaaactagacagaatgattctcagaaactcctttgtgatgtgtgtgttcaactcacagagttcaacctttcttttcatagagcagttgggaaacactctgtttgtaaagtctgcaagtggatattcagacctccttgaggccttcgttggaaacgggatttcttcatattatgctagacagaagaattctcagtaacttccttgtgttgtgtgtattcaactgacagagttgaactttcatttggagagagcagatttgaaacactgtttttgtggaatttgcaagtggagatttcaagcgctttggggccaaaggcagaaaaggaaatatcttcgtataaaaactagacagaatcattctcagaaaatcctctgtgatgtgtgctttcaactctcagagtttaacttttcttttcattcagcagtttggaaacactctgtttgtaaagtctgcacgtggatattttgaccacttagaggccttcgttggaaacgggtttttttcatgtaagggtagacagaagaattcccagtaacttccttgtgttgtgggcattcaactcacagagttgaacgttcccttagacagagcagatttgaaacactctatttgtgtaatttgcaagtgtagatttcaagcgctttaaggtcaacggcagaaaaggaaatatcttcgtttcaaaactagacagaatcattcccacaaacggcgttgtgatgtgttcgttcaactcacagagtttaacctttctgttcatagagcagttaggaaacactctgtttgtaaagtctgtaagtggatattctgacatcttgtggccttcgttggaaacgggatttcttcatattctgctagacagaagaattcccagtaacttccttgtgttgtgtacattcaactcacagagttgaacgttcccttagacagagcagacttgtaacactctttttgtggaatttgcaagtggagatttcagccgctttgaagtcaaaggtagaaaaggaaatatcttcctataaaaactagacagaatgattctcagaaactcctttgtgatgtgtgcgttcaactcacagagtttaacttttcttttcatagagccgttaggaaacactctgtttgtaaagtctgcaagtggatattcagacctctttgaggccttcgttggaaacgggatttcttcattttatgctagacagaagaattctcagtaacttccttgtgttgtgtgtattcagctgacagagttgaactttcatttagagagagcagatttgaaacactgtttttgtgtaatttgcaattggagatttcaagcgctttggggccaaacccagaaaaggaaatatcttcgtataaaaactagacagaatcattctcagaaactgctctgcgatgtgtgctttcaactctcagagtttaacttttcttttcattcagcagtttggaaacactctgtttgtaacgtctgcacgtggatattttgaccacttagaggccttcgttggaaacgggtttttttcctgtaaggctagacagaagaattcccagtaacttccttgtgttgtgtacattcaactcacagagttgaacgttcccttagacagagcagatttgaaacactctttttgtgcaattggcaagtggagaattcaagcgctttaaggtcaatggcagaaaaggaaatatcttcgtttcaaaactagacagaatgattctcagaaactcctttgtgatgtgtgcgttcaactcacagagtttaacctttcttttcatagagcagttaggaaacactctgtttgtaaagtctgcaagtggatattcagacctccttgaggccttcgttggaaacgggatttcctcatattatgctagacagaagaattcccagtaacttccttgtgttgtgtgtattcaactcacagagttgaacgatcctttacacagagcagacttgaaacactctttttgtggaatctgcaagtggagatttcagccgctttgaggtcaatggtagaataggaaatatcttcctatagaaactagatagaatgattctcagaaactcctttgtgatatgtgtgttcaactcacagattttaacctttcttttcatagagcagttagtaaacactctgtttataaagtctgcaagtggatattcagacccctttgaggccttcgttggaaacgggatttcttcatattctgctagacagaagaattctcagtaactttccttgtgttgtgtgtattcaactgacagagttgaactttcatttagagagagcagatttgaaacactgtttttgtggaatttgccagtggagatttcaagcgcattggggccaaaggcagaaaaggaaatatcttcgtataaaaactagacagaatcattctcagaaactgctctgcgatgtgtgcattcaactctcagagtttaatttttcttttcattcagcagtttggaaacactctctttgtaaagtctgcacgtggatattttgaccacttagaggccttcgttggaaacgggttttattcctgtaaggctagacagaagaattcccagtaacttccttgtgttgtgtacattcaactcacagagttgaacgttcccttagacagagcagatttgaaacactctttttgtgcaattggcaagtggagatttcaagcgctttaaggtcaatggcagaaaaggaaatatcttcgtttcaaaaccagacagaatcattcccaaaaactgcgttgtgatgtgtgcgttcaactaacagagtttaacctttcttttcatagagcagttaggaaacactctgtttgtaaactctgcaagtggatattcagacctctttgaggccttcgttggaaacgggatttcttcatactgtgctagacagaagaattctcagtaacttccttgtgttgtgtgtattcaactcacagagttgaacgatcctttacacagagcagacttgtaacactctttttgtggaatttgcaagtggagatttcagccgctttgaagtcaaaggtagaaaaggaaataacttcctataaaaactagacagaatgattctcagaaactcctttgtgatgtgtgcgttcaactcacagagtttaacctttcttttcatagagcagttaggaaacactctgtttgtaaagtctgcaagtggatattcagacctccttgaggctttcgttggaaacgggatttcttcatattatgctagaaagaagaattctcagtaacttccttgtgttgtgcgtattcaactgacagagttgaactttcatttagagagagcagatttgaaacactctttttgtggaatttgcaagtggagatttcaagcgctttggggccaaaggcagaaaaggaaatatcttcgtataaaaactagacagaatcattctcagaaactgctgcgtgatgtgtgcgttcaactctcagagtttaacctttcttttcattcagcggtttggaaacactctgtttctaaagtctgcacgtggatattttgaccacttagaggccttcgttggaaacgggtttttttcatgtaaggctagacagaagaattcccagtaacttccttgtgttgtgtgcattcaactcacagagttgaacgttcccttagacagagcagatttgaaacactctatttgtgcaatttgcaagtgtagatttcaagcgctttaaggtcaacggcagaaaaggaaatatcttcgtttcaaaactagacagaatgattctcagaaactcctttgtgatgtgtgccttcaagtcacagagtttaacctttcttttcatacagcagttaggaaacactctgtttgtaaagtctgcaagtggattttcagacctctttgtggccttcgttggaaacgggatttcttcatattctgctagacagaagaattctcagtaacttccttgtgttgtgtgtattcaactcacagagttgaacgatcccttacacagagcagacttgaaacactcttgttgtggaatttgcaagtggagatttcagccgctttgaggtcaatggtagaaaagggaatatcttcgtatagaaactagacagaatgattctcagaaacttctttgtgatgtgtgcgttcaactcacagagtttaacctttcttttcatagagcagttaggaaacactccgtttgtaaactctgcaagtggatattcagacctctttgaggccttcattggaaacgggatttctccatactatgctagacagaagaattctcagtaacttccttgtgttgtgtgtattcagctgacagagttgaactttcatttagagagagcagatttgaaacactgtttttgtgtaatttgcaattggagatttcaagtgctttggggccaaacgcagaaaaggaaatatcttcgtataaaaactagacagaatcattctcagaaactgctctgcgatgtgtgcgttcaactctcagagtttaacttttcttttcattcagcagtttggaaacactctgtttttaaagtctgcacgtggataatttgaccacttagaggccttcgttggaaacgggtttttttcatgtaaggctagacagaagaattcccagtaacttccttgggttgtgtacattcaactcacagagttgaacgtttccttagacagagcagatttgaaacactctttttgtgcaattggcaagtggtgatttcagccgctttgaggtcaatggtagaaaaggaaatatcttcgtataaaaactagacagaatgattctcagaaactcctttgtgatgtgtgcgttcaactcacagagtttaacttttcttttcatagagcagttaggaaacactctgtttgtaaagtctgcaagtggatattcagacctccttgaggccttcgttggaaatgggatttcttcatattctgctagacagaagaattctcactaacttccttgtgttgtgtgtattcaactcacagagtagaacgatcctttacacagagcagacttgaaacactctttttgtggaatttgcaagtggagatttcagccgctttgaggtcaatggtagaaaaggaaatatcttcgtataaagactagacagaatgattctcagaaactcctttgtgatgtgtgcgttcaactcacagagattaacttttcttttcatagagcagttaggaaacactctgtttgtaaagtctgcaagtggatattcagacctctttgtggccttcgttggaaacgggatttcttcatattatgctagacagaagaattctcagtaacttccttgtgttgtgtgtattcaactgacagagttgaactttcatttagagagagcagatttgaaacactgtttttgtggaatttgcaagtggagatttcaagcgctttggggtcaaaggcagaaaaggaaatatcttcgtataaaaactagacagaatcattctcagaaactgctctgcgatgtgtgcgttcaactctcagagtttaacttttcttttcattcagcagtttggaaacactctgtttgtaaagtctgcacgtggataatttgaccacatagaggccttcgttggaaacgggtttttttcatgtaaggctaaacagaagcattcccagtaacttccttgtgttgtgtgcattcaactcacagagatgaacgttcccttagacagagcagatttgaaacgctctatttgtgcaatttgcaagtgtagatttcaagcgctttaaggtcaatggcagaaaaggtaatatcttcgtttcaaaactagacagaatgattctcagaaacttctttgtgatgtgtgcgttcaactcacagagtttaacctttcttttcatagagcagttaggaaacactctgtttgtaaactctgcaagtggatattcagacctctttgaggccttcgttggaaacgggatttctccatactttgctagacagaagaattctcagtaacttccttgtgttgtgtgtattcaactcacagagttgaacgatcctttacacagagcggacttgaaacactcgttttgtggaatttgcaagtggagatttcagccgctttgaggtcaatggtagaaaaggaaatatcttcgtataaaaactagacagaatgattctcagaaactcctttgtgatgtgtgctgttcaactcacagagtttaacctttctgttcatagagcagttaggaaacactctgtttgtaaagtctgcaagtggatattcagacctccttgaggccttcgttggaaacgggatttcttcatattctgctagacagaagaattcccagtaacttccttgtgttgtgtgtgttcaactcacagagttgaactttcatttacacagagcagatttgaaacactctttttgtggcatttgcaagtggagatttcaagggctttgaggccaaaggcagaaaaggaaatatcttcgtttcaaaactagacagaatcattctcagaaactcctttgtgatgtgtgcgttcaactcacagagtttaacctttcttttcatagagcagttaggaaacactctgtttgtaaagtctgcaagtggatattcagacctccttgaggccttcgttggaaacgggatttcttcatattctgctagacagaagaattcccaggaacttccttgtgttgtgtacattcaactcacagagttgaacgttcccttagacagagcagatttgaaacactctttttgtgcaattggcaagtggtgatttcagccgctttgaggtcaatggtagaaaagggaatatcttcgtataaaaactagacagaatcaatcccacaaactgcgttgtgatgtgttcgttcaactcacagagtttaacctttttgttcatagagcagttaggaaacactctgtttgtaaagtctgtaagtggatattctgacattttgtggccttggttggaaatgggatttcttcatattctcctagacagaagaattctcagtaacttccttgtgttgtgtgtattcaactcacagagttgaaagatcctttacacagagcagacttgaaacactctttttgtggaatttgaaagtggagatttcagccgctttgaggtcaatggtagaaaaggaaatatcttcgtatagaaactagacagaatgattctcagaaactcctttgtgatgtgtgcgttcaactcacagagtttaacttttcttttcatagagcagttaggaaacactctgtttgtaaagtctgcaagtggatattgagacctctttgaggccttcgttggaaacgggatttcttcatattctgctagacagaagaattcccagtaacttccttgtgttgtgtgtgttcaactcacagagttgaactttcatttacacagagcagatttgaaacactctttttgtggaatttgcaagtggagatttcaagggctttgaggccaaaggcagaaaaggaaatatcttcgtttcaaaactagacagaatcattctcagaaactgctctgtgatgtgtgcgtacaactctcagagtttaacttttcttttcattcagcagtttggaaacactctgcaaagtctgcacgtagatattttgaccacttagaggccttcgttggaaacgggtttttttcatgtaaggctagacagaagaattcccagtaacttccttgtgttgtgtgcattcaactcacagagatgaacgttcccttagacagagcagatttgaaacactctatttgtgtaatttgcaagtgtagatttcaagcgctttaaggtcaatggcagaaaaggaaatatctccgtttcaaaactagacagaatgattctcagaaactcctttgtgatgtgtgtgttcaactcacagagtttaacatttcttttcatagagcagttaggaaacgctctgtttgtaaagtctgcaagtggatattcagacctcgttgagaccttcgttggaaacgggatttcttcatattctgctagacagaagaattctcagtaacttccttgtgttgtgtttattcaactcacagagttgaacgatcctttacacagagcagacttgaaacactctttttgtggaatttgcaagtggagatttcagccgctttgtggtcaatggtagaaaaggaaatatcttcgtataaagactagacagaatgattctcaaaactcctttgtgatgtgtgcgttcaactcacagagtttaacctttcttttcatagagcagttaggaaacactctgtttgtaaagtctgcaagtggatattcagacctctttgaggccttcgttggaaacgggatttcttcatattctgctagacagaagaattcccagtaacttccttgtgttgtgtgtgttcaactcacagagttgaactttcatatacacagagcagatttgaaacactctttttgtggaatttgcaagtggagatttcaagcgctttgaggccaaaggcagaaaaggaaatatcttcgtataaaaactagacagaatcattctcagaaactgctctgcgatgtgtgcgttcaactctcagagtttaacttttcttttcattcagcagtttgaaaacactctgtttgtaaagtctgcacgtggatattttgaccacttagaggccttcgttggaaacgggtttttttgcctgtaaggctagacagaagaattcccagtaacttccttgtgttgtgtgcattcaactcacagagttgaacgttcccttagacagagcagatttgaaacactctatttgtgcaatttgcaagtgtagatttcaagcgctttaaggtcaacggcagaaaaggaaatatcttcgtttcaaaactagacagaatgattctcagaaactcctttgtgatgtgtgcgttcaactcacagagtttaacctttctgttcatagagcagttaggaaacactctgtttgtaaagtctgtaagtggatattctgacatcttgtggccttcgttggaaacgggatttcttcatattctgctagacagaagaattctcagaatcttccttctgttgtgtgtattcaactcagagagttgaatgatcctttacacagagcacacttgaaacactctttttgtggaatttgcaagtggagatttcagccgctttgaggtccatggtagaaaaggaaatatcttcgtataaaaactagacagaatgattctgagaaactcctttgtgatgtgtgcgttcaactcacagagtttaacctttcttttcatagagcagtttggaaacactccgtttgtaaactctgcaagtggatattcagacctccttgaggccttccttggaaacgggatttcttcatattatgctagacagaagaattcccagtaacttccttgtgttgtgtgtgttgaactcacagagttgaactttcatttagacagagcagatttgaaacactctttttgtggaatttgcaaatggagaattcatgcactttgaggccaaaggcagaaaaggaaatatcttcgtataaaaactagacagaatcattctcagaaactgctctgcgatgtgtgcgtacaaatctcagagtttaacttttcttttcattcagcagtttggaaacactctgtttgtaaagtctgcacgtggataatttgacaacttagagaccttcgttggaaacgggtttttttcatgtaaggctagacagaagaattcccagtaacttccttgtgttgtgtacattcaactcacagagttgaacgttcccttagacagagcagatttgaaacactctttttgtgcaattggcaagtggagatttcaagcgctttgaggtcaatgacagaaaaggaaatatcttcgtttcaaaactagacagaaatcattcccacaaactgcgttgtgatgtgttcgttcatctcacagagtttaacctttcttttcatagagcagttaggaaacagtctgtttgaaaattctgtaagtggatattctgacatcttgtggccttcgttggaaacgggatttcttcatattctgctagacagagcaattctcagtaaacttccttgtgttgtgtgttttcaactcacagagttcaacgatcctttacacagagcagacttgaaacactctttttgtggaatttgcaagtggagatttcagccgctttgaggtcaatggtagaataggaaatatcttcctatagaaactagacagaatgattctcagaaactcctttgtgatgtgtgcgttcaactcacagagtttaacctttcttttcatagagcagttaggaaacactctgattgtaaagtctgcaagtggatattcagaactccttgaggccttcgttggaaacggagatttcttcatattatgctagacagaagaattctcagtaacttccttgtgttgtgtgtattcaactcacagagttgaacgatcctttacagagagcagacttgaaacactctttttgtggaatttgcaagtggagacttcagccgctttgaggtcaatggtagaaaaggaaactatctacgtataaagactagacagaatcattctcagaaactgctctgcgatgtgtgtgttcaactcacagagtttcacctttcttttcatagagcagataggaaacactctgtttgtaaagtctgcaagtcgatattcagacctctttgaggccttcgttggaaacgggtttttttcatataaggctagacagaagaattcccagtaacttccttgtgttgtgtgcattcaactcacagagttgaacgttcccttagacagagcagatttgaaacactctatttgtgcaatttgcaagtgtagatttcaagcgctttaaggtcaatggcagaaaaggaaatttcttcgttttaaaactagacagaatcattcccagaaactgcgttgtgatgtgttcgttcaactcacagagtttaacctttctgttcatagagcagttaggaaacactctgtttgtaaagtctgtaagtggatattctgacgtcttgtggccttcgttggaaacgggatttcttcatattctgctagacagaagaattctcagaaacttcgttgtgttgtgtgttttcaactcacagagttgaacgatcctttacacagagcagacttgaaacactctttttgtggaatttgcaagtggagatttcagccgctttgaggtcaatggtagaaaaggaaatatcttcgtataaaaactagacagaatgattctcagaaacttcattgtgatgtgtgcgttcaactcacagagtttaacctttcttttcatagagcagttaggaaacactctgtttgtaaactctgcaagtggatattcagacctctttgaggccttcgttggaaacgggatttctccatactgtgctagacagaagaattctcagtaacttccttgtgttgtgtgtattcaactgacagagttgaactttcatttcgagagagagcagatttgaaacactgtttttgtggaatttgcaagtggagatttcaagcgctttggggccaaaggcagaaaaggaaatatcttcgtataaaaactagacagaatcattctcaggaactactgcgtgatgtgtgggttcaactctcagagtttaacttttcttttcattcagcggtttggaaacactctgtttgtaaagtctgcacgtggaaattttgaccacttagaggccttcgttggaaacgggtttttttcatgtaaggctagacagaagaattcccagtaacttccttgtgttgtgtgcattcaactcacagagttgaacgttcccttagacagagcagatttgaaacactctatttgtgcaatttgcaagtgtagttttcaagctctttaaggtcaacggcagaaaaggaaatatcttcgtttcaaaactagacagaatgattctcataaactcctttgtgatgtgtgcattcaactcacagagtttcacctttcttttcatagagcagttaggaaacactctgtttgtaaagtctgcaagtggatattcagacctccttgaggccttcgttggtaacgggatttcttcatattctgctagacagaagaattctcagtaacttccttgtgttgtctgtattcaactcacagagttgaacgatcctttacacagagcagacttgaaacactctttttgtggaatttgcaagtggagatttcagccgctttgaggtcaatggtagaaaaggaaactatcttcgtataaagactagacagaatgattctcagaaacttctttgtgatgtgtgcgttcaactcacagagtttaacctttcttttcatagagcagttaggaaacactctgtttgtaaactatgcaagtggatattcagacctctttgaggccttcgttggaaacgggatttcttcatactatgctagacagaagaattcccagtaacttccttgtgttgtgtgtgttcaactcacagaggtgaacggtcctttacacagagcagatttgagacactctttttgtggaatttgctaatggagatttcaagcgctttgaggccaaaggcagaaaaggaaatatcttcgtataaaaactagacagaatcattctcagaaactgctgcgtgatgtgggcgttcaactctcagagtttaacttttcttttcattcagcggtttggaaacactctgtttgtaaagtctgcacgtggatattttgaccacttagaggccttcgttggaaacgggtttttttcatgtaaggctagacagaagaattcccagtaacttccttgtgttgtgtgcattcaactcacagagttgaacgttcccttagacagagcagatttgaaacactctatttgtgcaatttgcaagtgtagatttcaagcgctttaaggtcaacggcagaaaaggaaatatcttcgtttcaaaactagacagaatcattcctacaaactgcgttgtgatgtgttcgttcaactcacagagtttaacctttctgttcatagagcagttaggaaacactctgtttgtaaagtctgcaagtggatattcagacctccttgaggccttcgttggaaacgggatttcttcatattctgctagacagaagaattctcagtaacttccttgtgttgtgtgtattcaactcacagagttgaacgatcctttacacagaacagacttgaaacactctttttgtggaatttgcaagcgcagatttcagccgctttgaggtcaatggtagaacaggaaatatcttcctatagaaactagacagaatgattctcataaactcctttgtgatgtgtgcattcaactcacagagtttcacctttcttttcatagagcagttaggaaacactctgtttgtaaagtctgcaagtggatattcagacctccttgaggccttcgttggaaacgggatttcttcatattctgctagacagaagaattctcagtaacttccttgtgttgtgtgtattcaactcacagagttgaacgatcctttacaaagagcagacttgaaaaactctttttgtggaatttgcaagtggagatttcagccgctttgaggtcaatggtagaaaaggaaactatcttcgtataaagactagacagaatcattctcagaaactgctctgcgatgtgttcgttcaactctcagagtttaacttttcttttcattcagcagtttggaaacactctgtttgtaaagtctgcacgtggatattttgaccacttagaggccttcgttggaaacgggtttttttcctgtaaggctagacagaagaattcccagcaacttccttgtgttgtgtgcattcaactcacagagttgaacgttcccttagacagagcagatttgaaacactctatttgtgcaatttgcaagtgtagatttcaagcgctttaaggtcaatggcagaaaaggaaatatcgtcgtttcaaaactagacagataatcattcccacaaactgcgttgtgatgtgttcgttcaactcacagggtttaacctttctgttcatagagcagttaggaaacactctgtttgtaaagtctgtaagtggatattctgacatcttgtggccttcgttggaaacgggatttcttcatattctgctagacagaagaattctcagtaacttccttgtgttgtgtgtattcaactcaccagagttgaatgatcctttacacagaacagtcttgaaacactctttttgtggaatttgcaagtggagatttcagccgctttgaggtcaatggtagaataggaaatatcttcctatagaaactagacagaatgattctcagaaactcctttgtgatgtgtgcgttcaactcacagagtttaacctttcttttcatagcgcagttgggaaacactctgtttgtaaagtctgcaagtggatattcagacatccttgaggctttcgttggaaacgggatttcttcatattctgctataaagaagaattctcagtaacttccttgtgttttgtgtattcaactgacagagttgaactttcatttagagagagcagatttgaaacactgtttttgtggaatttgcaagtggagatttcaagcgctttgggaccaaaggcagaaaaggaaatatcttcgtataaaaactagacagaatcattctcagaaactgctgcgtgatgtgtgcgttcaactctcagagtttaacttttcttttcattcagcggtttggaaacactctgtttgtaaagtctgcacgtggatattttgaccacttagaggccttcgttggaaacgggtttttttcatgtaaggctagacagaagaattcccagtaacttccttgtgttgtgtgcattcaactcacagagttgaacgttcccttagacagagcagatttgaaacactctatttgtgcaatttgcaagtgtagatttcaagcgcattaaggtcaatggcagaaaaggaaatatcttcgtttcaaaattagacagaatgattctgagaaactcctttgtgatgtgtgcgttcaactcacagagttcaacctttcttttcatagagcagttgggaaacactctgtttgtaaagtgtgcaagtggatattcagacctccttgaggccttcgttggaaacgggatttcttcatattatgctagacagaagaattctcagtaacttccttgtgttgtgtgaattcaactcacaaagttgaacgatcctttacacagagcagacttgaaacactctttttgtggaatttgcaggtgtagatttcagccgctttttattcaatggtagaataggaaatatcttcctatagaaactagacagaatgattctcagaaactcctttgtgatgtgtgcgttcaactcacagagtttaacctttcttttcatagagcagttaggaaacactctgtttgtaaagtctgcaagaggatattcagacctctttgaggccttcgttggaaacgggtttttttcatataaggctagacagaagaattcccagtaacttccttgtgttgtgtgtgttcaactcacagagttgaactttcatttacacagagcagatttgaaacactctttttgtggaatttgcaagcggagatttcaagcgctttgaggccaaaggcagaaaaggaaatatctccgtttcaaaactagacagaatcattctcagaaactgctctgcgatgtgtgcattcaactctcagagtttaatttttcttttcattcagcagtttggaaacattctctttgtaaagtctgcacgtggatattttgaccacttagaggccttcgttggaaacgggttttattcttgtaaggctagacagaagaattcccagtaacttccttgtgttgtgtacattcaactcacagagttgaacgttcccttagacagagcagatttgaaacactctttttgtgcaattggcaaatggagatttcaagcgctttaaggtcaatggcagaaaaggaaatatcttcgtttcaaaactagacagaatgattctcagaaactcctttgagatgtgtgtgttcaactcacagagtttaacctttcttttcatagagcagttaggaaacactctgtttgtaaactctgcaagtggatattcagacctctttgaggccttcgttggaaaccggatttcttcatactgtgctagacagaagaattctcagaatcttccttgtgttgtgtgtattcaactcacagagttgaacgatcctttacacagagcagacttgaaacactctttttgtggaatttgcaagtggagatttcagccgctttgaggtccacggtagaaaaggaaatatcttcgtataacaactagacagaatgattctcagaaacttctttgtgatgtgtgcgttcaactcacagagtttaacctttcttttcatagagcagttacgaaacactctgtttgtaaactctgcaagtggatattcagacctctttgaggccttcgttggaaacgggatttcttcatactatgctagacagaagaattctcagtaacttccttgtgttgtgtgtattcaactgacagagttgaactttcatttagagagagcagacttgaaacactgtttttgtggaatttgcaagtggagatttcaagcgctttggggccaaaggcagaaaaggaaatatcttcgtataaaaactagacagaatcattctcagaaactgctctgcgatgtgtgcgttcaactctcagagtttaacttttcttttcattcagaagtttggaaacactctgtttgtaaagtctgcacgtggataacttgaccacttagaggccttcgttggaaacgggtttttttcatgtaaggctagacagaagaattctcagtaacttccttgtgttgtgtgtattcaactcacatagttgaacgatcctttacacagaacagacttgtaacactctttttgtggaatttgcaagtggagatttcagccactttgaagtcaaaggtagaaaaggaaataacttcctataaaaactagacagaatgattctcagtaaactcctttgtgatgtgtgcgttcaacacacagagtttaacttttcttttcatagagcagttaggaaacactctgtttgtaaagtctgcaagtggatattcagacctctttgaggccttcgttggaaacgggatttcttcatattctgctagacagaataattctcagtaacttccttttgttgtgtgtattcaactcacagagttgaacgatcctttacagagagcagacttgaaacactctttttgtggaatttgcaagtggagatttcagccgctttgaggtcaatggtagaataggaaatatcttcctatagaaactagacagaatgattctcagaaactcctttgtgatgtgtgcgttcaactcacagagtttaacctttcttttcatagagcagttgggaaacactctgtttgtaaagtctgcaagtggatattcagacatccttgaggctttcgttggaaaagggatttcttcatattctgctagaaagaagaattctcagtaacttccttgtgttgtctgtattcaactcacagagttgaacgatcctttacacagagcagacttgaaacactctttttgtggaatttgcaagtggagatttcagccgctttgaggtcaatggtagaataggaaatatcttgctatagaaactatacagaatcattctcagaaactgctgcgtgatgtgtgcgttcaactctcagagtttaacttttcttttcattcagcggtttggaaacactctgtttgtaaagtctgcacgtggaaattttgaccacttagaggccttcgttggaaacgggtttttttcatgtaaggctagacagaagaattcccagtaacttccttgtgttgtgtgcattcaactcacagagttgaacgttcccttagacagagcagatttgaaacactctatttgtgcaatttgcaagtgtagatttcaagcgctttaaggtcaatggcagaaaaggaaatatcttcgtttcaaaactagacagaatcattcccacaaactgcgttgtgatgtgttcgttcaactcatagagtttaacctttctgttcatagagcagttaggaaacactctgtttgtaaagtctgtaagtggatattctgacatcttgtggccttcgttggaaacgggatttcttcatattctgctagacagaagaattctcagtaacttccttgtgttgtgtgtattcaactcacagagttcaacgatcctttacacagagcagactcgaaacactctttttgtggaatttgcaattggagatttcagccgctttgaggtcaatggtagaaaaggaaatatcttcgtataaaaactagacagaatgattctcagaaactcctttgtgatgtgtgcgttcaactcacagagtttaacctttcttttcatagagcagttaggaaacactctgtttgtaaagtctgcacgtggatatttggacttctttgaggccttcgttggcaacggggttttttcatgtaaggctagacagaagaattctcagtaacttccttgtgttgtgtgtattcaactgacagagctgaactttcatttagagagagcacatttgaaacactgtttttgtggaatttgcaagtggagatttcaagcgctttggggccaaaggcagaaaaggaaatatcttcgtataaaaactagacagaatcattctcagaaactgctctgcgatgtgtgcattcaactctcagagtttaatttttcttttcattcagcagtttggaaacactctctttgtaaagtctgcacgtggatattttgaccacttagaggccttcgttggaaacgggttttattcctgtaaggctagacagaagaattcccagtaacttccttgtgttgtgtacattcaactcacagagttgaacgttcccttagacagagcagatttgaaacactctttttgtgcaattggcaaatggagatttcaagcgctttaaggtcaatggcagaaaaggaaatatcttcgtttcaaaactagacagaatcattcccacaaactgcgttgtgatgtgttcgttcaactcacagagtttaacctttcttttcatagagcagttaggaaacagtctgtttgtcaattctgtaagtggatattctgacatcttgtggccttcgttggaaacgggatttcttcacattctgctagacagaagaattatcagtaacttccttgtgttgtgtgtattcaactcacagagttgaacgatcctttacacagagcagacttgaaacactctttttgtggaatttgcaagtggagatttcagccgctttgaggtcaatagtagaaaaggaaatatcttcgtagaaaaactagacagaatgattctcagaaactcctttgtgatgtgtgcgttcaactcacagagtttaacctttcttttcatagagtagttaggaaacactctgtttgtaaagtctgcaagtggatattcagacatccttgaggctttcgttggaaacgggatttcttcatattctgctagaaagaataattctcagtaacttccttgtgttgtgtgtattcaactcacagagttgaatgatcctttacacagagcagacttgaaacactctttttgtggaatttgcttgtggagatttcagccgctttgaggtcaatggtagaataggaaatatcttcttatagaaactagacagaatcattctcagaaactgctctgcgatgtgtgcgttcaactctcagagtttaacttttcttttcattcagcagtttggaaacactctgtttgtaaagtctgcacgtggataacttgaccacttagaggccttcgttggaaacgggtttttttcatgtaaggctagacagaagaattcccagtaacttccttgtgttgtgtgcattcaactcacagagttgaacgttcccttagacagagcagatttgaaacactctatttgtgcaatttgcaagtgtagatttcaagcgctttaaggtcaatggcagaaaaggaaatgtcttcgtttcaaaactagacagaatcattcccacaaactgcgttgtgatgtgttcgttcaactcacagagtttaacctttctgttcatagagcagttaggaaacactctgtttgtaaagtctgtaagtggatattctgacatcttgtggccttggttggaaacgggatttcttcatattctgctagacagaagaattctcagtaacttccttgtgttgtgtgtattcaactcacagagttgaacgatggtttacacagagcagatttgaaacactctttttgtggaatttgcaagtggagatttcagcctctttgaggtcaatggtagaaaaggaaatatcttcgtataaaaactagacagaatgattctcagaaactcctttgtgatgtgtgcgttcaaatcacagagtttaacttttcttttcatagagcagttaggaaacactctgtttgtaaagtctgcaagtggatattcagacctctttgaggccttcgttggaaacgggattttttcatattatgctagacagaagaattctcagtaactgccttgtgttgtgtttattcaactcacagagttgaacgatcctttacacagagcagacttgaaatactctttttgtggaatttgcaagtggagatttcagccgctttgaggtcaatggtagaataggaaatatcttcctatagaaactagacagaatgattctcagaaactcatttgtgatgtgtgcgttcaactcacggagtttaacctttcttttcatagagcagttaggaaacactctgtttgtaaagtctgcaagtggatattcagacctctttgaggtcttcgttggaaacgggatttcttcatattctgctagacagaagaattcccagtaacttcccttgtgttgtgtacattcaactcacagagttgaacgttcccttagacagagcagatttgaaacactctttttgggcaattggcaagtggagattacaagcgctttaaggtcaatggcagaaaaggaaatatcttcgtttcaaaactagacagaatcattcccacaaactgcgttgtgatgtgttcgttcaactcacagagtttaacctttcggttcatagagcagttaggaaacactctgtttgtaaagtctgtaagtggatattctgacatcttgtggccttcgttggaaacgggatttcttcatattctgctagacagaagaattctcagtaacttccttgtgttgtgtgtattcaactcacagagttgaacgatcctttacacagagcagacttgaaacactctttttgtggaatttgcaagtggagatttcagccgctttgaggtcaatggtagaataggaaatatcttccaatagaaactagacagaatgattctcagaaactcctttgtgatgtgtgcgttcaactcacagagtttaacctttcttttcatagagcagttaggaaacactctgtttgtaaagtctgcaagtggatattcagacctctttgagtccttcgttggaaacgggatttcttcatattctgctagacagaagaattcccagtaacttccttgtgttgtgtgtgttcaactcacagagttgaactttcatttacacagagcagatttgaaacactctttttgtggaatttgcaagtggagatttcaagcgctgtgaggccaaaggcagaaaaggaaatatcttcgtataaaaactagacagaatcattctcagaaactgctctgcgatgtgtgcgttcaactctcagagtttaacttttcttttcattcagcagtttgaaaacactctgtttgtaaagtctgcacgtggataatttgaccacttagaggccttcgttggaaacgggtttttttcatgtaaggctagacagaagaattcccagtaacttccttgtgttgtgtacattcaactcacagagttgaacgttcccttagacagagcagatttgaaatactctttttgtgcaattggcaagtggagatttcaagcgctttaaggtcaatggcagaaaaggaaatatcttcgtttcaaaactagacagaatcattcccacaaactgcgttgtgatgtgttcgttcaactcacagagtttaacctttcttttcatagagcagttaggaaacagtctgtttttcaattctgtaagtggatattctgacatctagtggccttcgttggaaacgggatttcttcatactgtgctagacagaagaattctcagtaacttccttgtgttgtgtgtatttaactcacagagttgaacgatcctttacacagagcagacttgaaacactcttttggtggaatttgcaagtggatatttcagccgctttgaggtcaatggtagaataggaaatatcttcctatagaaactagacagaatgattctcagaaactcctttctgatgtgtgcattcaactcacagagtttaacctttcttttcatagagcagttaggaaacactctgtttgtaaagtctgcaagtggatattcagacctctttgaggccttcgttggaaacgggatttcttcatattctgctagagagaagaattcccagtaacttccttgtgttgtgtgtgttcaactcacagagtttgaactttcatttacacagagcagatttgaaacactctttttgtggaatttgcaagtggagatttcaagcgctttgaggccaaaggcagaaaaggaaatatcttcgtttgaaaactagacagaatcattctcagaaactgctctgcgatgtgtgccttcaactctcagagtttaacttttcttttcattcagcagtttggaaacactctgtttgtaaagtctgcacgtggatattttgaccacttagaggccttcgttggaaatgggtttttttcctgtaaggctagacagaagaattcccagtaacttccttgtgttgtgtgcattcaactcacagagttgaacgttcccttagacagagcagatttgaaacactctatttgtgcaatttgcaagtgtagatttcaagcgctttaaggtcaatggcagaaaaggaaatatcttcgtttcaaaactagacagaatcattcccacaaactgcgttgagatgtgttcgttcaactcacagagtttaacctttccgttcatagagcagttaggaaacacactgtttgtaaagtctgtaagtggatattctgacatcttgtggccttcgttggaaacgggatttcttcatattctgctagacagaataattctcagtaacttccttgtgttgtgtgtattcaactcacagagttgaacgatcctttacagagagcagacttgaaacactctttttgtggaatttgcaagtggagatttcggccgctttgaggtcaatggtagaataggaaatatcttcctatagaaactagacataatgattctcagaaactcctttgtgatgtgtgcgttcaactcacagagtttaacctttcttttcctagagcagttagtaaacactctgtttataaagtctgcaagtggatattcagacccctttgaggccttcgttggaaacgggatttcttcatattatgctagacagaagaattctcagtaacttccttgtgttgtgtgtattcaactgacagagttgaactttcatttagagagagcagatttgaaacactgtttttgtggaatttgcaagaggagatttcaagcgctttggggctaaaggcagaaaaggaaatatcttcgtataaaaactagacagaatcattctcagaaactgctgcgtgatgtgtgcgttcaactctcagagtttaacttttcttttcattcagcagtttggaaacactctgtttgtaaagtctgcacgtggaaattttgaccacttagaggccttcgttggaaacgggtttttttcatgtaaggctagacagaagaattcccagtaacttccttgtgttgtgtgcattcaactcacagagttgaacgttcccttagacagagcagatttggaacactctatttgtgcaatttgcaagtgtagatttcaagcgctttaaggtcaacggcagaaaaggaaatatcttcgtttcaaaactagacagaatcattcccacaaactgcgttgtgatgtgttcgttcaactcacagagtttaacctttctgttcatagagcagttaggaaacactctgtttgtaaagtctgtaagtggatattctgacatcttgtggccttcgttggaaactggatttctccatattctactagacagaataattctacagtaacttccttgtgttgtgtgtattcaactcacagagttgaaggatcctttacagagagcaggcttgaaacactctttttgtcgaatttgcaagtggagatttcagccgctttgaggtcaatggtagaataggaaatatcttcttatagaaactagacagaatgattctcataaactcctttgtgatgtgtgcgttcaactcacagagtttaacctttctgttcatagagcagttaggaaacactctgtttgtaaagtctgcaagtggatattcagacctccttgaggccttcgttggaaacgggatttcttcatattctgctagacagaagaattctcagtaacttccttgtgttgtgtgtattcaactcacagagttgaatgatcctttacacagagcagacttgaaacactctttttgtggaatttgcaagtggagatttcagccgctttgaggacaatggtagaaaagtaaatatcttcgtataaagactagacagaatcattctcagaaactgctgcgtgatgtgtgcgttcaactctcagagtttaacttttcttttcattcagcggtttggaaacactctgtttgtaaagtctgcacgtggatattttgaccacttagaggccttcgttggaaacgggtttttttcatgtaaggctggacagaagaattcccagtaacttccttgtgttgtgtgcattcaactcacagagttgaacgttcccttagacagagcagatttgaaacactctatttgtgcaacttgcaagtgtagatttcaagccctttaaggtcaacggcagaaaaggaaatatcttcgtttcaaaactagacagaatcattcccacaaactgcgttgtgatgtgttcgttcaactcacagagtttaacctttctgttcatagagcagttaggaaacactctctttgtaaagtctgtaagtggatattctgatatcttgtggccttcgttggaaacgggatttcttcatattctgctagacagaagaattctcagtaacttccttgtgttgtgtgtatacatctcacagagttgaacgatcctttacacagagcagacttgaaacactctttttgtggaatttgcaagtggagatttcagccgctttgaggtccatggtagaaaaggaaatatcttcgtataaaaactagacagaatgattctcagaaactcctttgtgatgtgtgcgttcaactcacagagtttaacctttcttttcatagagcagttaggaaacactctgtttgtaaagtctgcaagtgaatattcagacatccttgaggttttcgttggaaacgggatttcttcatattctgctagaaagaagaattctcagtaacttccttgtgttgtgtgtattcaactcacagagttgaatgatcctttacacagaacagtcttgaaacactctttttgtggaaattgcaagtggagatttcagccgctttgaggtcaatggtagaataggaaatatcttcctatagaaactagacagaatcattctcagaaactgctctgcgatgtgtgcgttcaactctctgagtttaactttgcttttcattcagcagtttggaaacactctgtttgtaaagtctgcacgtggataatttgaccacttagaggtcttcgttggaaacgggattttttcatgtaaggctagacagaagaattcccagtaacttccttgtgttgtgtacattcaactcacagagttgaacggttcccttagacagagcagatttgaaacactctttttgtgcaattggcaaatggatatttcaagcgctttaaggtcaatggcagaaaaggaaatatcttcgtttcaaaactggacagaatcattcccacaaactgcgttgtgatgtgttcgttcaactcacagagtttaacctttcttttcatagagcagttaggaaacactctgtttgtaaattctgtaagtggatattctgacatcttgtggccttcgtttgaaacgggatttcttcatattctgctagacagaataattctcagtaacttccttgtgttgtgtttattcaactcacagagttgaatgatcctttacacagagcagacttgaaacactctttttgtggaatttgcaagtggagatttcagccgctttgaggtcaatggtagaaaagtaaatatcttcctataaagactagacagaatgattctcagaaactcctttgtgatgtgtgcgttcaactcacagagtttaacctttctgttcatagagccgttaggaaacactctgtttgtaaagtctgcaagtggatattcagatctctttgaggccttcgttggaaacgggatttcttcatattatgctagacagaagaattcccagtaacttccatgtgttgtgtgtgttcaactcacagagttgaactttcatttacacagagcagatttgaaacactctttttgtggaatttgcaaatggaggtttcaagcgctttgaggccagaggcagaaaaggaaatatcttcgtataaaaactagacagaatcattctcagaaactgctctgcgatgtgtgcgttcaactctcagagtttaacttttcttttcattcagcagtttggaaacactctgtttgtaaagtctgcatgtggataatttgaccacttagaggtctttgttggaaacgggtttttttcatgtaaggctagacagaagaattctcagtaacttccttgtgttgtgtgtattcaactcacagagttgaacgttcctttacacagagcagacttgtaacactctttttgtggaatttgcaagtggagatttcagccgctttgaagtcaaaggtagaaaaggaaatatcttcctataaacactagacagaatcattggcacaaactgcgttgtgatgtgttcgttcaactcacagagtttaacctttcttttcatagagcagttaggaaacagtctgtttgtaaattctgtaagtggatattctgacatcttgtgaccttcgttggaaacgggatttcttcatattctgctagacagaagaattctcagtaacttccttgtgttgtgtgtattcaactcacagaattgaacgatcctttacacagagcagacttgaaacattctttttgtggaatttgcaagtggagatttcagccgctttgaggtcaatcgtagaataggaaatatcttcctatagaaactagacagaatgattctcagaaactcctttgtgatgtgtgcgttcaactcacagagtttaacctttcttttcatagagcagttaggaaacactctgtttgttaagtctgcaagtggatattcagtcctctttgaggccatcgttggaaacgggatttcttcatattatgctagacagaagaattctcagtaacttccttgtgttgtgtgtattcaactcacagagttgaacgatcctttacacagagcagacttgaaacactctttttgtggaatttgcaagtggagatttcagccgctttgaggtcaatggttgaataggaaatatcttccaatagaaactagacagaatgattctcagaaactcctttgtgatgtgtgcgctcaactcacagagtttaacttttcttttcatagagcagttaggaaacactctgtttataaagtctgcaagtggatattcagacctctttgaggccttcgttggaaacgggagttcttcatattctgctagacagaagaattctcagaaactcccttgtgttgtgtgtattcaactgacagagttgaactttcatttagacagagcagatttgaaacactctttatgtggaattggccagtggagatttgaagcgctttgagaccaaaggcagaaaaggaaatatcttcgtttcaaaactagacagaatcattcccacaaactgcgttgtgatgtgttcgttcaacacacagggtttaacctttcttttcatagagcagttaggaaacactctgtttgtaaagtctgtaagtggatattctgacatcatgtggccttcgttggaaacgggatttcttcatattctgctagacagaagaattctcagtaacttccttgtgtagtgtgtattcaactcacagagttgaacgatcctttacacagagcagacttgtaacactctttttgtggaatttgcaagtggagatttcagccactttgaagtcaaaggtagaaaaggaaataacttcctataaaaactagacagaatgattctcagaaactcctttgtgatgtgtgcgttcaactcacagagtttaacctttcttttcatagagcagttaggaaacactctgtttgtaaagtctgcaagtggatattcagacctctttgaggccttcgttggaaacgggtttttttcatataaggctagatagaagaattctcagtaacttccttgtgttgtgtgtattcaactgacagagttgaactttcatttagagagagcagatttgaaacactgtttttgtggaatttgcaagtggagatttcaagcgctttggggccaaaggcagaaaacgaaatgtcttcgtataaaaactagacagaatcattctcagaaaccgctctgtgatgtgtgcgttcaactctcagagtttaacttttcttttcattcagcagtttggaaacactctgtttgtaaagtctgcacgtggatattttgaccacttagaggccttcgttggaaacgggttttttttcatgtaaggctagacagaagaattcccagtaacttccttgtgttgtgtacattcaactcacagagttgaacgttcccttagacagagcagatttgaaacactctttttgtgcaattggcaagtggagatttcaagcgctttgaggtcaatggcagaaaaggaaatatcttcgtttcaaaactagacagaatgattctcataaactcctctgtgatgtgtgcgttgaactcacagagtttaacttttcttttcatagagcagttaggaaacactctgtttgtaaagtctgcaagtggatattcagacgtctttgaggccttcgttggaaacgggatttcttcatattatgctagacagaataattctcagtaacttccttgtgttgtgtgtattcaactcacagagttgaacgatcctttacagagagcagacttgaaacactctttttgtggaatttccaattggagatttcagccgctttgaggtcaatcgtagaataggaaatatcttcctatagaaattagatagaatgattctcagaaactcctttgtgatgtgtgcgttcaactcacagagtttaacctttcttttcatagagcagttaggaaacactctctaaagtctgcaagtggatattcagacctccttgaggtcttcgttggaaacgggatttcttcatattctgctagacagaagaattcccagtaacttccttgtgttgtgtgtgttcaactcacagagttgaactttcatttacacagagcagattggaaacactctttttgtggaatttgcaagtggagatttcaagcgctttgaggccaaaggcagaaaaggaaatatcttcgtataaaaactagtcagaatcattctcagaaactgctctgtgatgtgtgcgttcaactctcagagtttaacttttcttttcattcagcagtttggaaacactctgtttgtaaagtctgcacgtggatattttgaccacttagaggccttcgttggaaacgggttttttttcatgtaaggctagacggtagcattcccagtaacttccttgtgttgtgtgcattcaactcacagagatgaacgttcccttagacagagcagatttgaaacgctctatttgtgcaatttgcaagtgtagatttcaagcactttaaggtcaatggcagaaaaggaaatatcttcgtttcaaaactagacagaatgattctcagaaaatcttttgtgatgtgtgcgttcaactcacagagtttaacttttcttttcatagagcagttaggaaacactctgtttgtaaagtctgcaagtggatattcagacctgtttgaggccttcgttggaaacgggatttcttcatattctgctagacagaagaattctcagtaacttccttgtgttgtgtgtattcaactcacagagttgaaggatcctttacagcgagcaggcttgaaacactctttttgtcgaatttgcaagtggagatttcagccgctttgaggtcaatggtagaataggaaatatcttcttatagaaactagacaaaatgattctcagaaactcctttgtgatgtgtgcgttcaactcacagagtttaacctttcttttcatagagcaggtaggaaacactctgtttgtaaagtctgcaagtggatattcagacctccttgaggccttcgttggaaacgggattccttcatattctgctatacagaaacaattcccagtaacttccttgtgttgtgtgtgttcaactcacagagttgaactttcatttacacagagcagatttgaaacactctttttgtggaatttgcaagtggagatttcaagcgctttgaggccaaaggcagaaaaggaaatatcttcgtataaaaactagacagaatcattctcagaaactgctctgcgatgtgtgcgttcaactctcagagtttaacttttcttttcattcagcagtgtggaaacactctgtttgtaaagtctgcacgtggatattttgaccacttagaggccttcattggaaacgggtttttttcctgtaaggctagacagaagaattctcagtaacttccttgtgttgtgtgtattcaactcacagagttgaacgatcctttacacagagcagacttgtaacactctttttgtggaatttgcaagtggagatttcagccgctttgaagtcaaaggtagaaaaggaaatatctccctataaaaactagacagaatgattctcagaaacttctttgtgatgtgtgcgctcaactcacagagtttaacctttcttttcatagagcagttaggaaacactctgtttgtaaagtctgcaagtggatattcagacctctttgaggccttcgtaggaaacgggatttcttcatattatgctagacagaagaattctcagtaacttccttgtgttgtgtgtattcaactcacagagttgaacgatcctttacacagagcagacttgaaacactctttttctggaatttgcaagtggagatttcagccgctttgaggtcaatggtagaataggaaatatcttcccatagaaactagacagagtgattctcagaaactcctttgtgatgtctgcgttcaactcacagagtttaacctttcttttcgtagagcagttaggaaacactctgtttgtaaagtctgcaagtggatattcagacctccttgaggccttcgttggaaacgggatttcttcatattctgctatacagaagaattctcagaatcttccttgtgttgtttgtattcaactcacagagttgaactttcatttacacagagcagatttgaaacactctttttgtggaatttgcaaatggagatttcaagcgctttgaggccaaaggcagaaaaggaaatatcttcgtataaaaactagacagaatcattctcagaaactgctgcgtgatgtgtgcgttcaactctcagagtttaacttctcttttcattcagcggtttggaaacactctgtttgtaaagtctgcacgtggaaattttgaccacttagaggccttcgttggaaacgggtttttttcatttaaggctagacagaagaattcccagtaacttccttgtgttgtgtgcattcaactcacagacttgaacgttcccttagacagagcagatttgaaacactctatttgtgcaatttgcaagtgtagatttcaagcgctttcaggtcaatggcagaaaaggaaatatcttcgtttcaaaactagacagaatcattcccacaaacagcgttgtgatgtgttcattcaactcacagagtttaacctttcttttcatagagcagttaggaaacagtctgtttgtaaattctgtaagtggatattctgacatcttgtggccttcgttggaaacgggatttcttcatattctgctagacagaagaattctcagtaacttccttgtgttgtgtgaattcaactcacagagttgaacgatcctttacacagagcagacttgaaacactctttttgtggaatttgcaagtggagatttcagccgctttgaggtcaatggtagaaaaggaaactatcttcatataaagactagacagaatgattctcagaaactcctttgtgatgtgtgcgttcaactcacagaatttaacctttcttttcatagagcagttaggaaacactctgtttgtaaagtctgcaagtggatattcagacctctttgaggccttcgttggaaacgggtttttttcatataaggctagacagaatcattctcagaaactgctctgcgatgtgtgcgttcaactctcagagtttaacttttcttttcattcagcagtttggaaacactctgtttgtaaagtctgcacgtggataatttgaccacttagaggccttcgttggaaacgggttgttttcatgtaaggctagacagaagaattcccagtaacttaccttgtgttgtgtacattcaactcacagagttgaacgttcccttagacagagcagatttgaaacactttttttgtgcaattggcaaatggagatttcaagcgctttaaggtcaatggcagaaaaggaaatatcttcgtttcaaaactagacagaatcattcccacaaactgcgttgtgatgtgttcgttcaactcacagagtttaacctttctgttcatagagcagttaggaaacactctgtttgtaaagtctgcaagtggatattctgacatcttgtggccttcgttggaaacgggatttcttcatcttctgctagacagaagaattctcagtaacttccttgtgttgtgtgtattcaactcacagagttgaacgatcctttacacagagcgcacttgaaacactcgttttgtggaatttgcaagtggagatttcagccgtgttgaggtaaatggtagaaaaggaaatatcttcgtataaaaactagacagaatgattctcagaaactcctttgtgatgtgtgcgttcaactcacagagtttaacctttcttttcatagagcagttaggaaacactctgtttgtaaagtctgcaagtggatattcagacctccttgaggccttcgttggaaacgggatttcttcatattctgctatacagaagaattctcagaaacttccttgtgttgtgtgtattcaactcacagagttgaacgatcgtttacacacagcagacttgagacactctttttgtggaaattgtaagtggagatttcagccgctttgaggtcaatggtagaaaaggaaatatcttcatataaaaactagacagaatcattctcagaaactgctgtgtgatgtgtgcgttcaactctcagagtttaacttttcttttcattcagcggtttggaaacactctgtttgtaaagtctgcacgtggatattttgaccacttagaggccttcgttggaaacgggtttttttcatgtaaggctagacagaagaattcccagtaacttccttgtgttgtgtgcattcaactcacagagttgaacgttcccttagacagagcagatttgaaacactctatttgtgaatttgcaagtgtagatttcaagcgctttaaggtcaaaggcagaaaaggaaatatcttcgtttcaaaactagacagaattattcccacaaactgcgttgtgatgtgttcgttcaactcacagagtttaacctttctgttcatagagcagttaggaaacactctgtttgtaaagtctataagtggatattctgacatcttgtggccttcgttggaaacgcgatttcttcatattctgttagacagaagaattctcagaatcttccttgtgttgtgtgtattcaactcacacagttgaacgatggtttacacagagcagatttgaaacactatttttgtggaatttgcaagtggagatttcagccgctttgaggtcaatggtagaaaaggaaatatcttcgtataaaaactagagagaatgattctcagaaactcctttgtgatgtgtgtgttcaactcacagagtttaacctttcttttcatagagcagttagtaaacactctgtttataaagtctgcaagtggatattcagacccctttgaggccttcgttggaaatgggattgcttcatattatgctagacagaagaattctcagtaacttccttgtgttgtgtgtattcaactgacagagttgaactttcatttggagagagcagatttgaaacactgtttttgtggaatttgcaagtggaaatttcaagcgctttggggtcaaaggcagaaaaggaaatatcttcgtataaaaactagacagaatcattctcagaaactgctgcgtgatgtgtgcgttcaactctcagagtttaacttttcttttcattcagcggtttggaaacactctgtttgtaaagtctgcacgtggatattttgaccacttagaggccttcgttggaaacgggttttttttcatgtaaggctagacagaagaattcccagtaacttccttgtgttgtgtgcattcaactcacagagttgaacgttcccttagacagagcagatttgaaacactctagttgtgcaatttgcaagtgtagatttcaagcgctttaaggtcaatggcagaaaaggaaatatcttcgtttcaaaactagacagaatcattcccacaaactgcgttgtgatgtgttcgttcaactcacagagtttaacctttccgttcatagagcagttaggaaacactctgtttgtaaagtctgtaagtggatattctgacatcttgtggccttcgttggaaacgggatttcttcatattctgctagacagaagaattctcagtaacttccttgtgttgtgtgtattcagctcacagagttgaacgatcctttacaccgagcagacttgaaacactctttttgtggaatttgcaagtggtgatttcagccgctttgaggtcaatggtagaaaaggaaactattttcgtataaagactagacagaatgattctcagaaactcctttgtgatgtgtgcgttcaactcacagaagtttaacctttcttttcatagagcagttatgaaacactctgtttgtaaagtctgcaagtggatattcagacctctttgaggccttcgttggaaacgggtttttttcatataaggctagacagaagaattctcagtaacttccttgtgttgtgtgtattcaactgacagagttgaactttcatttagagagagcagatttgaaacactgtttttgtggaatttgcaagtggagatttcaagcgatttggggccaaaggcagaaaaggaaatatcttcgtataaaaactagacagaatcattctcagaaactgctgcgtgatgtgtgcgttcaactctcagagtttaacttttcttttcattcagcggtttggaaacactctgtttgtaaagactgcacgtggatattttgaccacttagaggccttcgttggaaacgggattttttcatgtaaggctagacagaagaattcccagtaacttccttgtgttgtgtgcattcaactcacagagttgaacgttcccttagacagagcagatttgaaacactctatttgtccaatttgcaagtgtagatttcaagcgctttaaggtcaacggcagaaaaggaaatatcttcgtttcaaaactagacagaatcattcccacaaactgcgttgtgatgtgttcgttcaacccacagagtttaacctttctgttcatagagcagttaggaaacacactgtttgtaaagtatgaaagtggatattctgacatcttgtggccttcgttggaaacgggatttcttcatattctgctagacagaagaattctcagtaacttccttgtgttgtgtgtattcaactcacagaattgaacgatcctttacacagagcagacttgaaacactctttttgtggaatttgcaagtggagatttcagccgctttgaggtcaatggtagaaaaggaaatatcttcgtatagaaacaagacagaatgattctcagaaacttcattgtgatgtgtgcgttcaactcacagagtttaacctttcttttcatagagcagttaggaaacactctgtttgtaaactctgcaagtcgatattcacacctctttgaggccttcgttggaaacgggatttcttcatactgtgctagacagaagaattcccagtaacttccttgtgttgtgtgtgttcaactcacagagttgaactttcatttacccagagcagatttgaaacactttttttgtggaatttgcaagtggagatttcaagcgctttgaggccaaaggcagaaaaggaaatatcttcgtttcaaaactagacagaatcattctcagaaactgctgcgtgatgtgtgcgttcaactctcagagattaacttttcttttcattcagcggtttggaaacactctgtttgtaaagtctgcacgtggatattttgaccacttagaggccttcgttggaaacgggtttttttcatgtaaggctagacagaagaattcccagtaacttccttgtgttgtgtgcattcaactcacagagctgaacgttcccttagacagagcagatttgaaacactctatttgtgcaatttgcaagtgtagatttcaagcgctttaaggtcaacggcagaaaaggaaatatcttcgtttcaaaaccagacagaatcattcccacaaactgcgttgtgatgtgtgcgttcaactcacagagttcaacttttcttttcatagagcagttaggaaacactctgtttgtaaagtctgcaagtggatattcagacctatttgaggccttcgttggaaacgggatttcttcatattctgctagacagaataattctcagtaacttccttgtgttgtgtgtattcaactcacagagttgaatgatcctttacagagagcagacttgaaacattctttttgtggaatttgcaagtggagatttcagccgctttgaggtcaatggtagaaaaggaaatatcttcgtataaagactagacagaatgattctcagaaactcctttgtgatgtgtgcgttcaactcacagagtttaacttttcttttcatagagcagttaggaaacactctgtttgtaaagtctgcaagtggatattcagacctctttgaggccttcgttggaaatgggatttcttcgtattctgctagacagaagaattctcagtaacttccttgtgttgtgtgtattcaactgacagagttgaactttcatttagagagagcagatttgaaacactgtttttgtggaatttgcaagtggagatttcaagcgcttttgggccaaaggccgaaaaggaaatatcttcgtataaaaactagacagaatcattctcagaaactgtggcgtgatgtgtgcgttcaactctcagagtttaacttttcttttcattcagcggtttggaaacactctatttgtaaagtctgcccgtggatattttgaccacttagaggccttcgttggaaacgggtttttttcatgtaaggctagacagaagaattcccagtaacttccttgtgttgtgtgcattcaacttgcagagttgaacgttcccttagacagagcagatttgaaacactctatttgtgcaatttgcaagtgtagatttcaagcgctttaaggtcaatggcagaaaaggaaatatcttcgtttcaaaactagacagaaatcattcccacaaactgcgttgtgatgtgttcgttcaactcacaggagtttaacctttcttttcatagagcagttaggaaacagtctgtttgtcaattctgtaagtggatattctgacatcttgtggccttcgttggaaacgggatttcttcatatttggctagacagaaataattctcagtaacttccttgtgttgtgtgtattcaactcacagagttgaaggatcctttacagagagcaggcttgaaacactctttttgtcgaatttgcaagtggagatttcagccgctttgaggtcaatggtagaataggaaatatcttcttatagaaactagacagaatgattctcagaaactcctttgagatgtgtgtgttcaactcacagtttaacctttcttttcatagagcagttaggaatcactctgtttgtaaagtctgcaagtggatattcagacctctttgaggccttcgttggaaacgggtttttttcatataaggctagacagaagaattctcagtaacttccttgtgttgtgtgtattcaactgacagggttgaactttcatttagagagagcagatttgaaacactgtttttgtggaatttgcaagtggagatttcaagcgctttggggccaaaggcagaaaaggaaatatcttcgtataaaaactagacagaatcattctcagaaactgctgcgtgatgtgtgcgttcaactctcagagtttaacttttcttttcattcagcggtttggaaacactctgtttgtaaagtctgcacgtggaaattttgaccacttagaggccttcgttggaaacgggtttttttcatgtaaggctagacagaagaattcccagtaacttccttgtgttgtgtgcattcaactcacagagttgaacgttcccttagacagagcagatttgaaacactctatttgtgcaatttgcaagtgtagatttcaagcgctttaaggtcaatgacagaaaaggaaatatcttcgtttcaaaactagacagaatcattcccacaaactgcgttgtgatgtgttcgttcaactcacagagttttacctttctgttcatagagcagttaggaaacactctgtttgtaaagtctgcaagtggatattcagacctccttgagaccttcgttggaaacgggatttcttcatattctgctagacagaagaattctcagtaacttccttgtgttgtgagtattcaactcacagagttgaacgatcctttacacagagcagacttgaaacactctttttgtggaatttgcaagaggagatttcagccgctttgaggtcaatggtagaaaaggaaatatcttcgtataaagactagacagaatgattctcagaaactcctttgtgatgtgtgcgttcaactcacagagttcaacctttcttttcatagagcagttgggaaacactctgtttgtaatgtctgcaagtggatattcagacttccttgaggccttcgttggaagcgggatttcttcaaattctgctagacagaataattctcagtaacttccttgtgttgtgtgtattcaactcacagatttgaacgatcctttacacagagcagacttgaaacattctttttgtggaatttgcaagtggagatttcagccgctttgaggtcaatggtagaataggaaatatcttcctatagaaactagacagaatcattctcggaaactgctctgtgatgtgtgcgttcaagtctcagagtttaacttttcttttcattcagcagtttggaaacactctgtttgtaaagtctgcacgtggatattttgaccacttaaaggccttcgttggaaacgtgtttttttcctgtaaggctagacagaagaattcccagtaacttccttgtgttgtgtacattcaactcacagagttgaacgttcccttagacagagcagatttgaaacactctttttgtgcaattggcaagtggtgatttcagccgctttgtggtcaatggtataaaaggaaatatcttcgtataaaaactagacagaatcattctcagaaactgctctgcgatgtgtgcgttcaactctcagagtttaacttttcttttcattcagcagtttggaaacactctgtttctaaagtctgcacgtggataacttgaccacttagaggccttctttggaaacgggtttttttcctgtaaggctagacagaagaattcccagtaacttccttgtgttgtgtacattcaactcacagagttgaaccgttcccttagacagagcagatttgaaacactctttttgtgcaattggcaagtgctgatttcagccgctttgaagtcaatggtagaaaaggaaatatcttcgtataaaaactagacagaatgattctcagaaacttcattgtgatgtgtgccgttcaactcacagagtttaacctttcttttcatagagcagttaggaaacactctgtttgtaaactctgcaagtggatattcagacctctttgaggccttcgttggaaacgggatttcttcatactgtgctagacagaagaattctcagtaacttcattgtgttgtgtgtattcaactcacagatttcaacgatcctttacacagagcagacttgaaatactctttttatggaatttgcaagtggagatttcagccgctttgaggtcaatgtagaataggaaatatcttcctatagaaattagacagaatcattctcagaaactgctgcgtgatgtgtgcgttcaactctcagagtttaacttttcttttcattcagcggtttggaaacactctgtttgtaaagtctgcacgtggatattttgaccacttagaagccttcgttggaaacgggtttttttcatgtaaggctagacagaagaattcccagtaacttccttgggttgtgtacattcaactcacagagttgaacgttcccttagacagagcagatttgaaacactctttttgtgcaattggcaagtggagatttcaagcgctttaaggtcaatggcagaaaaggaaatatcttcgtttcaaaactagacagaatcattcccacaaactgtgttgtgatgtgttcgttcaactcacagagtttaacctttcttttcatagagcagttaggaaacactctgttggtaaattctgtaagtggatattctgacatcttgtggccttcgttggaaacgggatttcttcatattctgctacacagaagaattctcagtaacttccttgtgttgtgtgtattcaactcacagagttgaacgatcctttacacagagcagacttgaaacactctttttgtggaatttgcaagtggagatttcagccgttttgaggtcaatggtagaaaaggaaatatcttcgtataaagactagacagaatgattctaagaaaatcttttgtgatgtgtgcgttcaactcacagagtttaacttttcttctcatagagcagttaggaaacactctgtttgtaaagtgtgcaagtggatattcagacctctttgaggccttcgttggaaacgggatttcttcatattatgctagacagaagaattcccagtaacttccttgtgttgtgtgtgttcaactcacagagttgaactttcatttacacagagcagatttgaaacactctttttgtggaatttgcaaatggagatttcaagcgctttgaggccaaaggcagaaaaggaaatatcttcgtttcaaaactagacagaatcattctcagaaactgctctgcgatgtgttcgttcaactctcagagtttaacttttcttttcattcagcagtttggaaacactctgtttgtaaagtctgcacgtgcataatttgaccacttagaggccttcgttggaaacgggttttttttcatgtaaggctagacagaagaattcccagtaacttccttgcgttgtgtacattcaactcacagagttgaacgttcccttagacagagcagatttgaaacactctttttgtgcaattggcaagtggagatttcaagcgctttaaggtcaatggcagaaaaggaaatatcttcgtttcaaaactagacagaatcattcccaaaaactgcgttgtgatgtgttcgttcatctcacagagtttaacctttcttttcatagagcagttaggaaacagtctgtttgtaaattctgtaagtggatattctgacatcttgtggccttcgttggaaacgggatttcttcatattctgctagacagaagaattctcagtaacttccttgtgttgtgtgtattcaactcatagaggtgaacgatcctttacacagaacagacttgaaacactctttttgtggaatttgcaagtggagatttcagccgctttgagttcaatggttgaataggaaatatcttcctatagaaactagacagaatgattctcagaatctcctttgtgatgtgtgcgttcaactcacagagtttaacctttcttttcatagagcatttaggaaacactctgtttgtaaagtctgcaagtggatattcagacctccttgaggccttcgttggaaacgggatttcttcatattatgctagacagaagaattctcagtaacttccttttgttgtgtgtattcaactgacagagttgaaccttcccttagacagagcagatttgaaacactctttttgtggagtttgcaagtggagatttaaagcgctttgaggccaaaggcagaaaaggaaatatcttcgtataaaaactagacagaatcattctcagaaactgctgcgtgatgtgtgcgttcaactctcagagtttaacttttcttttcattcagcggtttggaaacactctgtgtgtaaagtctgcacgtggatattttgaccacttagaggccttcgttggaaacgggtttttttcatgtaaggctagacagaagaattcccagtaacttccttgtgttgtgtgcattcaactcacagagttgaacgttcccttagacagagcagatttgaaacactctatttgtgcaatttgcaagtgtagatttcaagcgctttaaggtcaacggcagaaaaggaaatatcttcgtttcaaaactagacagaatgattctcagaaactcctttgtgatgtgtgcgttcaactcacagagtttaacctttcttttcgtagagcaggtaggaaacactctgtttgtaaagtctgcaagtggatattcagacctctttgaggccttcgttggaaatgggatttcttcatattctgctagacagaataattctcagtaacttccttgtgttgtgtgtattcaactcacagatttgaacgatcctttacagagagcagacttgaaacactctttttgtcgaatttgcaagtggagatttcagccgctttgaggtcaatagtagaaaaggaaatatcttcgtagaaaaactagacagaatgattctcagaaactgctttgtgatgtgtgcgttcaactcacagagtttaacctttcttttcatagagcagttgggaaacactctgttggtaaagtctgcatgtggatattcagacatccttgaggctttcgttggaaacgggatttcttcatattctgctagaaagaagaattctcagtaacttccttgtgttgtgtgtgttcaactcacagagttgaactttcatttacacagagcagattggaaacactctttttgtggaatttgcaagtggagatttcaagcgctttgaggccaaaggcagaaaaggaaatatcttcgtataaaaactagacagagtcattctcagaaactgctctgtgatgtgtgcgttcaactgtcatagtttaacttttcttttcattcagcagtttggaaacactctgtttgtaaagtttgcacgtggacattgtgaccacttagaggcctttgttggaaacgggtttttttcatgaaaggctagacagaagaattcccagtaacttccttgtgttctgtgcactcaactcacagagatgaacgttcccttagacagagcagatttgaaacactctatttgtgcaatttgcaagtgtagatttcaagcgctttaaggtcaatggcagaaaaggaaatattttcgtttcaaaactagacagaatgattctcacaaactcctttgtgatgtgtgcgttcaactcacagagtttaacctttcttttcatagagcagttaggaaacactctgtttgtaaagtctgcaagtggatattcagacctctttgaggccttcgttggaaacgggatttcttcatattctgctagacagaagaattctcagtaacttccttgtgttgtgtttattcaactcacagagttgaatgatcctttacacagagcagacttgaaacactctttttgtggaatttgcaagtggagatttcagccgctttgaggtcaatggtagaaaaggaaatatcttcgtataaagactagacagaatgattctcagaaactcctttgtgatgtgtgcgttcaactcacagagtttaacctttcttttcatagagcagttaaaaacactctgtttgtaaagtctgcaagtggatattcagacctctttgaggccttcattggaaacgggtttttttcatataaggctagacagaagaattcccagtaacttccttgtgttgtgtgtgttcaactcacagagttgaactttcatttacacagagcagatttgaaacactctttttgtggaatttgcaaatggagatttcaagcgctttgaggccaaaggcagaaaaggaaatgtcttcgtttcaaaactagacagaatcattctcagaaactgctctgcgatgtgtgcgttcaactctcagagtttaacttttcttttcattcagcagtttggaaacactctgtttgtaaagtctgcacgtggataacttgaccagttagaggccttcgttggaaacgggtttttttcctgtaaggctagacagaagaattcccagtaacttccttgtgttgtgtgcattcaactcacagagttgaacgttcccttagacagagcagatttgaaacactctatttgtgcaatttgcaagtgtagttttcaagctctttaaggtcaacggcagaaaaggaaatatcttcgtttcaaaactagacagaatcattcccacaaactgcgttgtgatgtgttcgttcaactaacagagtttaacctttcttttcatagagcagttaggaaacagtctgtttgtcaattctgtaagtggatattctgacatcttgtggccttcgttggaaacgggatttcttcatattctactagacagaagaattcccagtaacttccttgtgttgtgtgtgttcaactcacagagttgaactttcatttacacagagcagatttgaaacactctttttgtggaatttgcaaatggagatttcagccgcgttgaggccaatggtagaaaaggaaatatcttcgtttcaaaactagacagaatgattctcagaaactcctttgtgatgtgtgcgttcaactcacacagtttaacctttcttttcatagagcagttaggaaacactctgtttgtaaagtctgcaagtggatattcagacctccttgaggccttcgttggaaacgggatttcttcatattctgctagaaagaaaaattctcagaatcttccttgtgttgtgtgtattcaactcacagagttgaacgatcctttacacagagcagatttgaaacactctttttgtggaatttgcaagtggagatttcaagcgctttgaggctaaaggcagaaaaggaaatatcttcgtataacaactagacagaatcattctcagaaactgctctgcgatgtgtgcgttcaactctcagagtttaacttttcttttcattcagcagtttggaaacactctgtttgtaaagtctgcacgtggatattttgaccatttagaggccttcgttggaaacgggtttttttcttgtaaggctagacagaagaattcccaggaacttccttgtgttgtgtacattcaactcacagagttgaacgttcccttagacagagcagatttgaaacactctttttgtgcaattggcaagtggtgatttcagcagctttgaggtcaatggtagaaaaagaaatatcttcgtataaaaactagacagaatcattcccacaaactgcgttgtgaggtgttcgttcaactcacagagtttaacctttcttttcatagagcagttaggaaacagtctgtttgtaaattctgtaagtggatattctgacatcttgtggccttcgttggaaacgggatttcttcatattctgctagacagaagaattctcagaaactttccttgtgttgtgtgtattcaactcacagagttgaacgatcgtttacacagagcagacttgagacactctttttgtggaatttgtaagtggagatttcagccgctttgaggtcaatggtagaaaaggaaatatcttcatatataaaccagacagaatgattctcagaaactcctttgtgatgtgtgtgttcaactcacagagtttaacctttcttttcatagaacagttagtaaacactctgtttttaaagtctgcaagtggatattcagacccctttgaggccttcgttggaaacgggatttcttcatattctgctagacagaagaattcccagtaacttccttgtgttgtgtgtgttcaactcacagagttgaactttcatttacacagagcagatttgaaacactctttttgtggaatttgcaaatggagatttcaagcgcttggaggccaaaggcagaaaaggaaatatcttcgtataaaaactagacagaatcattctcagaaactgctctgcgatgtgtgcgttcaactctcagagtttaacttttcttttcattcagcagtttggaaacactctgtttgtaaagtctgcacgtggataatttgaccacttacaggccttcgttggaaacgggtttttttcatgtaaggctagacagaagaattcccagtaacttccttgtgttgtgtacattcaactcacagagttgaacgttcccttaaacagagcagatttgaaacactctttttgtgcaattggcaagtggagatttcaagcgctttgaggtcaatggcagaaaaggaaatatcttcgtttcaaaactagacagaatgattctcagaaactcctttgtgatgtgtgcgttcaactcacagagtttaacctttcttttcatagagcagttaggaaacactctgtttgtaaagtcggcaagtggatattcagtcctcattgaggccttcgttggaaacgggatttcttcatattctgctagacagaagaattctcagtaacttccttgtgttgtgtgtattcaactcacagagttgaacgatcctttacacagagcagacttgaaacacactttttgtggattttgcaagtggagatttcagcctctttgagatcaatggtagaataggaaatatcttcctatagaaactagacagaatgattgtcagaaactcctttgtgatgtgtgcgttcaactcacagagtttaaccattcctttcatagagcagttaggaaacactctgtttgtaaagtctgcaagtggatattcagacatctttgaggccttcgttggaaacgggatttcttcatattctgctagacagaagaattctcagtaacttccttgtgttgtgtgtattcaactgacagagttgaactttcatttagagagagcagatttgaaacactgtttttgtggaatttgcaagtggtgacttcaagcgctttggggccaaacgcagaaaaggaaatatcttcgtataaaaactagacagaatcattctcagaaactgctctgcgatgtgtgcgttcaagtctcagagtttaacttttcttttcattcagcagtttggaaacactctgtttgtaaagtctgcacgtggatattttgaccacttagaggccttcgttggaaacgggtttttttcctgtaaggctagacagaagaattcgcagtaacttccttgtgttgtgtacattcaactcacagagttgaacgttcccttagacagagcagatttgaaacactctttttgtgcaattggcaagtggagatttcaagcgctttaaggtcaatggcagaaaaggaaatatcttcgtttcaaaactagacagaatgattcccagaaaatcctttgtgatgtgtgcgttcaactcacagagtttaacttttcttttcatagaacagttaggaaacactctgtttgtaaagtctgcaagtggatattcagacctctttgaggccttcgttggaaacgggatttcttcatattatgctataaagaagaattctcagtaactttccttgtgttgtgtgtattcaactcacagagttgaacgatcctttacagagagcagacttgaaacactctttttgtggaatttgcaagtggagatttcagccgctttgaggtcaatggtagaataggaaatatcttccaatagaaactagacagaatgattctcagaaacttctttgtgatgtgtgcgttcaactcacacagtttaacctttcttttcatagagcagttaggaaacactctgtttgtaaagtctgcaagtggatattcacacctccttgaggccttcgttggaaacgggatttcttcatattatgctagacagaagaattcccagtaacttccttgtgttgtgtgtgttcaactcacagagttgaactttcatttacacagagcagatttgaaacactctttttgtggaatttcaagtggagatttcaagcgctttgaggccaaaggcagaaaaggaaatatcttcgtataaaaactagacagaatgattctcagaaactcctttgtgatgtgtgcgttcaactcacagagtttaacctttcttttcattcaccagtttggaaacactctgtttgtaaagtctgcacgtggatattttgaccacttagaggccttcgttggaaacgggtttttttcctgtaaggctagacagaagaattcccagtaacttccttgtgttgtgtgcaatcaaatcacagagttgaacgttcccttagacagagtagatttgaaacactctatttgtgcaatttgcaagtgtagatttcaagcgctttaaggtcaaaggcagaaaaggaaatatcttcgtttcaaaactagacagaatcattcccacaaactgcgttgtgatgtgttcgttcaactcacagcagtttaacctttcttttcatagagcagttaggaaacagtctgtttgtaaattctgtaagtggatattctgacatcttgtggccttcgttggaaaagggatttcttcatattctgctagacagaataattctcagtaacttccttgtgttgtgtgcattcaactcacagagttgaacgatcctttacagagagcagacttgaaacactctttttgtggaatttgcaagtggagatttcagccgctttgaggtcaatggtagaataggaaatatcttcctacagaaactagacagaatgattctcataaactcctttgtgatgtgtgcgttcaactcacagagtttaacctttcttttcatagagcagttaggaaacactctgtttgtaaagtctgcaagtggatattcagacctctttgaggccttcgttggaaacgggatttcttcatattctgctagacagaagaattctcagtaacttccttgtgttgtgtgtattcaactcacagagttgaacgatcctttacacagagcatacttgaaacactctttttgtggaatttgcaagtggagatttcagccgctttgaggtcaattgtagaaaaggaaatatcttcgtagaaaaactagacagaatcattctcagaaagtgctctgcgatgtgtgcgttcaactctcagagtttaactttgcttttcattcagcagtttggaaacactctgtttgtaaagtctgcacgtggataatttgaccacttagaggccttcgttggaaacgggtttttttcatgtaaggctagacagaagaattcccagtaacttccttgtgttgtgtgcattcaactcacagagttgaacgttccctagacggagcagatttgaaacactctatttgtgcaatttgcaagtgtagatttcaagcgctttaaggtcaatggcagaaaaggaaatatcttcgtttcaaaactagacagaatcattcccacaaactgcgttgtgatgtgttcgttcatctcacagagtttaacctttcttttcgtagagcagttaggaaacagtctgtttgtaaattctgtaagtggatattctgacatcttgtggccttcgttggaaacgggatttcttcatattgctgctagacagaagaattctcagtaacttccttgtgttgtctgtattcaactcacagagttgaacgatcctttacacagagcagacttgaaacacactttttgtggaatttgcaagtggagatttcagccgctttgaggtcaatggtagaataggaaatatcttcctatagaaactagacagaatgattctcagaaactcctttgtgatgtgtacgttcaactcacagagtttaacctttcttttcatagagcagttaggaaacactctgtttgtaaagtctgcaagtggatattccgacatccttgaggctttcgttggaaacgggatttcttcatattctgctagaaagaagaattcccagtaacttccttgtgttgtgtgtgttcaactcacagagttgaactttcatttacacacagcagatttgaaacactctttttgtggaatttgcaaatggagatttcaagcgctttgaggccaaaggcagaaaaggaaatatcttcgtataaaaactagacagaatcattctcagaaactgctctgcgatgtgtgcgttcaactctcagagtttaactttgcttttcattcagcagtttggaaacactctgtttgtaaagtctgcacgtggataatttgaccacttagaggccttcgttggaaacgggtttttttcatgtaaggctagacagaagaattcccagcaacttccttgtgttgtgtgcattcaactcacagagttgaacgttcccttagacagagcagatttgaaacactctatttgtgcaatttgcaagtgtagatttcaagccctttaaggtcaatggcagaaaaggaaatatcttcgtttcaaaactagacagaatcattctcagaaactgctctgcgatgtgtgcgttcaactctccgagtttaacttttcttttcattcagcagtttggaaacactctgtttgtaaagtctgcacgtggataatttgaccacttagaggccttcgttggaaacggttttttttcatgtaaggctagacagaagaattctcagtaacttccttgtgttgtgtgtattcaactcacagagttgaacgatcctttacacagaccagacttgtaacactctttttgtggaatttgcaagtggagatttcagccgctttgaagtcaaaggtagaaaaggaaatatcttcgtataaaaactagacagaatgattctcagaaactcctttgtgatgtgtgtgttcaactcacagagtttaacctttcttttcatagagcagttagtaaacactctgtttgtacagtctgaaagtggatattcagacccctttgaggccttcgttggaaaagggatttcttcatattatgctagacagaagaattcccagtaacttccttgtgttgtgtgtgttcaactcacagagttgaactttcatttacacagagcagatttgaaacactctttttgtggaatttgcaagtggagatttcaagcgctttgaggccaaaggcagaaaaggaaatatcttcgtttgaaaactagacagaaatgattctcagaaactcctttgtgatgtgtgcgttcaactcacagagtttaacctttcttttcatggagctgttaggaaacactctgtttgtaaagtctgcaagtggatattcagacctctttgaggccttcgttggaaacgggtttttttcatataaggctagacagaagaattcccagtaacttccttgtgttgtgtacattcaactcacagagttgaacgttcccttagacagagcagatttgaaatactctttttgtgcaattggcaagtggagatttcaagcgctttaaggtcaatggcagaaaaggaaatatcttcgtttcaaaactagacagaatcattcccacaaactgcgttgtgatgtgttcgttcaactcacagagtttaacctttcttttcatagagcagttaggaaacactctgtttgtaaattctgtaagttgatattctgacatcttgtggccttcgttggaaactggatttcttcatattctgctagacagaagaattctcagaatctttccttgtgttgtgtgtattcaactcacagagttgaacgatggtttacacagagcagatttgaaacactctttttgtggaatttgcaagtggagatttcagccgctttgaggtcaatggtagaaaaggaaatatcttcgtataaaaactagacagaatgattctcagaaactcctttgtgatgtgtgcgttcacctcacagagtttaacctttcttttcatagagcagttaggaaacactctgtttgtaaagtctgcaagtggatattcagacctctttgaggccttcgttggaaacgggatttcttcatattatgctagacagaagaattcccagtaacttcccttgtgttgtgtgtattcaactcacagagttgaactttcatttacacagagcagatttgaaacactctttttgtggaatttgcaaatggagatttcaagcgctttgaggccaaaggcagaaaaggaaatatcttcggtataaaaactagacagaatcattctcagaaactgctctgtgatgtgtgcgttcaactctcagagtttaacttttcttttcattcagcagtttggaaacactctgtttgtaaagtctgcacgtggataatttgaccacttagaggccttcattggaaacgggtttttttcatgtaaggctagacagaagaattcccagtaacttccttgtgttgtgtacattcaactcacagagttgaacgttcccttagacagagcagatttgaaacactctttttgtgcaattggcaagtggagatttcaagcgctttaaggtcaatggcagaaaaggaaatatcttcgtttcaaaactagacagaatgattctcagaaactcctttgtgatgtgtgcgttcaactcacagagtttaaactttcttttcatagaggagttaggaaacactctgtttgtaaagtctgcaagcggatattcagacctctttgaagccttcgttggaaacgggatttcttcatattctgctagacagaagaattctcagtaacttccttgtgttgtgtgtattcaactcacagagatgaacgatcctttacacagagcagacttgaaacactccttttgtggaatttgcaagtggagatttcagccgctttgaggtcaatggtagaaaaggaaactatcttcgtataaagactagacagaatgattctcagaaactcctttgtgatgtgtgtgttcaactcacagagtttaacctttcttttcatagagcagttaggaaacactctgtttgtaaagtctgtaagtggatattcagacctctttgaggccttcgttggaaacgggtttttttcatataaggctagacagaagaattcccagtaacttccttgtgttgtgtgtgttcaactcacagagttgaactttcatttacacagagcagatttgaaacactctttttgtggaatttgcaaatggagatttcaagcgctttgaggccaaaggcagaaaaggaaatatcttcgtataaaaacttgacagaatcattctaagaaactgctctgtgatgtgtgtgttcaactctcagagtttaacttttcttttccttcagcagtttggaaacactctgtttgtaaagtctgcacgtggataatttgaccacttagaggccttcgttggaaacgggtttttttcatgtaaggctagacagaagaattcccagtaacttccttgtgttgtgtacattcaactcacagagttgaacgttcccttaaacagagcagatttgaaacactctttttgtgcaattggcaaatggagatttcaagggctttaaggtcaatggcagaaaaggaaatatcttcgtttcaaaactagacagaacgattctcagaaactcctttgtgatgtgtgcgttcaactcacagagtttaacctttcttttcatagagcagttaggaaacactctgtttgtaaagtctgcaagtggatattcagacctctttgaggccttcgttggaaacgggatttcttcattttctgctagacagaagaattctcagtaacttccttgtgttgtgtgtattcaactcacagagttgaacgatcctttacacagagcagacttgaaacactctttttgtggaatttgcaagtggagatttcagccgctttgtggtcaacggtagaaaaggaaatatcttcgtataaagactagacagaatgattctcagaaactcctttgtgatgtgtgtgttcaactcacagagtttaacctttcttttcatagagcagttagtaaacactctgtttataaagtctgcaagtggatattcagacccctttgaggccttcgttggaaacgggatttcttcatcttatgctagacagaagaattctcagtaacttccttgtgttgtgtgtattcaactgacagagttgaactttcatttagacagagcagatttgaaacactctttttgtggaatttgcaagtggagatttcaagcgctttgaggccaaaggcagaaaaggaaatatctttgtataaaaactagatagaatcattctcagaaactgctctgcgatgtgtgcgttcaactctcagagtttaacttttcttttcattcagcagtttggaaacactctgtttataaagtctgcacgtggatattttgaccacttagaggccttcgttggaaacgggtttttttcctgtaaggctagacagaataattcccagtaacttccttgtgttgtgtacattcaactcacagagttgaacgtacccttagacagagcagatttgaaacactctttttgtgcaattggcaagtggagatttcaagcgctttaaggtcaatggcagaaaaggaaatttcttcgtttcaaaactaaacagaatcattcccacaaactgcgttgtgatgtgttcgttcaactcacagagtttaacctttcttttcatagagcagttaggaaacagtctgtttgtaaattctgtaagtggatattctgacatcttgtggccttcgttggaaacgggatttcttcatattctgctagacagaagaattctcagtaacttccttgtgttgtgtgtattcaactcacagagttgaacgatcctttacacagagcagacttaaaacactctttttgtggaatttgcaagtggagatttcagccgctttgaggtcaatagtagaaaaggaaatatcttcgtagaaaaactagacagaatgattctcagaatctcctttgtgatgtgtgcgttcaactcacagagtttaacctttcttttcatagagcagttaggaaacactctgtttgtaaagtctgcaagtggatattcagacctctttgtggccttcgttggaaacgggtttttttcatataaggctagacagaagaattttcagtaacttccttgtgttgtgtgtattcaactcacagagttgaacgatcctttacagagagcagacttgaaacactctttttgtggaatttgcaagtggagatttcagccgctttgaggtcaatggtggaataggaaatatcttcctatagaaactagacagaatcattctcagaatctgcagcgtgatgtctgcgttcaactctcagagtttaacttttcttttcattcagcggtttggaaacactctgtttgtaaagtctgcacgtggatattttgaccacttagaggccttcgttggaaacgggtttttttcatgtaaggctagacagaagaattcccagtaacttccttgtgttgtgtacattcaactcacagagttgaacgttcccttagacagagcagatttgaaacactctttttgtgcaattggcaaatggagatttcaagcgctttaaggtcaatggcagaaaaggaaatatcttcgtttcaaaactagacagaatcattcccacaaactgcgttgtgatgtgttcgttcatctcacagagtttaacctttcttttcatagagcagttaggaaacagtctgtttgaaaattctgtaagtggatattctgacatcttgtggccttcgttggaaacgggatttcttcatattctgctagacagaagaatactgagtaacttccgcgtgttgtgtgtattcaactcacagagttgaacgatcctttacacagagcagacttgaaacactctttttgtggaatttgcaagtggagatttcagccgctttgaggtcaatggtagaaaaggaaatatcttcatataaaaactagacagaatgattctcagaaactcctttgtgatgtgtgcgttcaactcacagagtttaacttttcttttcaaagagcagttaggaaacactctctttgtaaagtctgcaagtggatattcagacctctttgaggccttcgttggaaacgggatttcttcatattctgctagacagaagaattcccagtaacttccttgtgttgtgtgtgttcaactcacagagtggaactttcatttacacagagcagatttgaaacactctttttgtggaatttgcaagtggagatttcaagcgctttgaggccaaaggcagaaaaggaaatatcttcgtttcaaaactagacagaatcattctcagaaactgctgcgtgatgtgtgcgatcaactctcagagtttaacttttcttttcattcagcggtttggaaacactctgtttgtaaagtctgcacgtggatattttgaccacttagaggccttcgttggaaacgggttttattcatgtaaggctagacagaagaattcccagtaacttccttgtgttgtgtgcattcaactcacagagttgaacgttcccttagacagagcagatttgaaacactctatttgtgcaatttgcaagtgtagatttcaagcgctttaaggtcaatggcagaaaaggaaatttcttcgtttcaaaactagacagaatcattcccacaaactgcgttgtgaagtgctcgttcaactcacagattttaacctttctgttcatagagcagttaggaaacactctgtttgtaaagtctgcaagtggatattctgacatcttgcggccttcgttggaaacggaatttcttcatattctgctagacagaagaattctcagtaacttccttgtgttgtgtgtattcaactcacagagttgaacgatcctttacacagagcagacttgtaacactctttttgtggaatttgcaagtggagatttcagccgatttgaagtcaaaggtagaaaaggaaatatcttcctataaaaactagacagaatgattctcagaaactcctttgtgatgtgtgcgttcaactcacagagttcaacctttcttttcatagagcagttgggaaacactctgtttgtaaagtctgcaagtggatattcagacttctttgaggccttcgttggaagcgggatttcttcatgttctagacagaagaattctcagtaacttccttgtgttgtgtgtattcaactgacagagttgaaatttcatttagagggagcagatttgaaacactgtttttgtggaatttgcaagtggagatttcaaacgctttggggccaaaggcagaaaaggaaacatcttcgtataaaaactagacagaatcattctcagaaactgctctgcgatgtgtgcgttaaactctcagagtttaacttttcttttcattcagcagtttggaaacactctgtttgtaaagtctgcacgtggatattttgaccacttagaggccttcgttggaaacgggtttttttcctgtaaggctagacagtagaattcccagtaacttccctgtgttgtgtgcattcaactcacagagttgaacgttcccttagacagagcagatttgaaacactctatttgtgcaatttgcaagtgtagatttcaagcgctttaaggtcaatggcagaaaaggaaatatcttcctttcaaaactagacagaatcattcccacaaactgcgttgtgatgtgttcattcaactcacagagtttaacctttcttttcatagagcagttaggaaacagtctgtttgtcaattctgtaagtggatattctgacatcttgtggccttcgttggaaacgggatttcttcatattctgctagacagaagaattctcagtaacttccttgtgttgtgtgtattcaactcacagagttgaacgatcctttacacagagcagacttgaaacactctttttgtggaatttgcaagtggagatttcagccgctttgaggtcaatggtagaaaaggaaactatcttcatatagagactagacagaatgattctcagaaaatcttttgtgatgtgtgcgttcaactcacagagtttaacttttcttctcatagagcagttaggaaccactctgtttgtaaagtctgcaagtggatattcagacctctttgaggccttcgttggaaacttgatttcttcatattatgctagacagaagaattcccagtaacttccttgtgttgtgtgtgttcaactcacagagttgaactttcatttacacagagcagatttgaaactctctttttgtggaatttgcaagtggagatttcaagcgctttgaggccaaaggcagaaaaggaaatatcttcgtttcaaaaccagacagaatcattctcagaagctgctgcgtgatgtgtgcgttcaactctcagagtttaacttttcttttcattcagcggtttggaaacactctgtttgtgaagtctgcacgtggatattttgaccacttagaggccttcgttggaaacggtttttttgcatgtaaggctagacagaagagttcccagtaacttccttgtgttgtgtacattcaactcacagagttgaacgttcccttagacagagcagatttgaaacactctttttgtgcaattggcaagtggagatttcaagcgctttaaggtcaatggcagaaaaggaaatatcttcgtttcaaaactagagagaatcattcccacaaactgcgttgtgatgtgtttgttcaactcacagagtttaacctttcttttcatagagcagttaggaaacagtctgtttgtcaattctgtaagtggatattctgacatcttgtggccttagttggaaacgggatttcttcatattctgctagacagaagaattctcagtaactttccttgtgttgtgtgtattcaactcacagagttgaacgatcctttacacagagcagacttgaaacactctttttggggaatttgcaagtggagatttcagccgctttgaggtcaatggtagaaaaggaaactatcttcatataaagactagacagaatgattctcataaactcctttgtgatgtgtgcgttcatctcacagagtttaacttttattttcatagagcagttaggaaacactctgtttgtaaagtctgcaagtggatattcagacctccttgaggccttcgttggaaacgggatttcttcatattctgctagacagaagaattctcagtaacttccttgtgttgtgtgtattcaactcacagagttgaacgatcctttacacagagcagacttgaaacactctttttgtggaatttgcaagtggagatttcagccgctttgaggtcaatggtagaaaaggaattatcttcgtataaagactagacagaatgattctcagaatctcctttgtgatgtgtgcgttcaactcacagagtttaacctttcttttcatagagcagttaggaaacactctgtttgtaaagtctgcaagtggatattcagacctctttgatgccttcgttggaaacgggtttttttcatataaggctagacagaagaattcccagtaacttccttgtgttgtgtgcattcaactcacagagttgaacgttcccttagacagagcagatttgaaacactctatttgtgcaatttgcaagtgtagatttcaagcgctttaaggtcaacggcagaaaaggaaatatcttcgtttcaaaactagacagaatgattctcagaaactcctttgtgatgtgtgcgttcaactcacagagttcaacctttcttttcatagagcagttaggaaacactttgtttgtaaagtctgcaagtggatattcagacttctttgaggccttcgttggaagcgggatttcttcatgttctgctagacagaagaattcctcagtaacttcccttgtgttgtgtgtattcaactcgcagagttgaacgatcctttacacagagcagacttgaaacactctttttgtggaatttgcaagtggagatttcagccgctttgaggtcaatagtagaaaaggaaatatcttcgtagaaaaactagacagaatgattctcataaactcctttgtgatgtgtgcgttcaactcacagagtttaacttttgttttcatagagcagttaggaaacactctgtttgtaaagtctgcaagtggatattcagacctctttgaggccttcggtggaaacgggatttcttcatattctgctagacagaagaattcccagtaacttccttgtgttgtgtgttttttaactcacagagttgaactttcatttacacagagcagatttgaaacactctttttgtggaatttgcaagtggagatttcaagcgctttgaggccaaaggcagaaaaggaaatatcttcgtataaaaactagacagaatcattctcagaaactgctgcgtgatgtgtgcgttcaactctcagagtttaacttttcttttcattcagcggtttggaaacactctgtttgtaaagtctgcacgtggatattttgaccacttagaggccttcgttggaaacgggtttttttcatgtaaggctagacagaataattctcagtaacttgcttttgttgtgtgtattcaactcacagagttgaacgatcctttacagagagcagacttgaaacactctttttgtggaatttgcaagtggagatttcagccgctttgaggtcaatggtagaataggaaatatcttcctatagaaactagacagaatgattctcataaactactttgtgatgtgtgcgttcaacacacagagtttaaactttctgttcatagagcagttaggaaacactctgtttgtaaagtctgtaagtggatattctgacatcttgtggccttcgttggaaacgggatttcttcatattctgctagacagaagaattctcagtgacttccttgtgttgtgtgtattcaactcacagagttgaacgatcctttacacagagcagtcttgaaacactctttttgtggaatttgcaagtggagatttctgccgctttgaggtcaatggtagaataggaaatatcttcctatagaaactagacagaatgattctcagaaactcctttgtgatgtgtgcgttcagctcacagagttcaacctttcttttcatagagcagttgggaaacactctgtttgtaaagtctgcaagtggatattcagacttctttgaggccttcgttggaagcgggatttcttcatgttctgctagacagaagaattcccagtaacttccttgtgttgtgtgtgttcaactcacagagctgaactttcatttacacagagcagatttgaaacactctttttgtggaatttgcaaatggagatttcaagcgctttgaggccaaaggcagaaaaggaaatatcttcgtataaaaactagacagaatcattctcagaaactgctctccgatgtgtgcattcagctctcagagtttaacttttcttttcattcaccagtttggaaacactctgtttgtaaagtctgcacgtggatattttgaccacttagaggccttcgttggaagcgggcttttgtcatgtaaggttagacagaatatttcccagtaacttccttgtgttgtgtacattcaactcacagagttcaacgttcccttagacagagcagatttgaaacactctttttgtgaaattggcaagtggagatttcaagcgcttaatgtcaatggcagaaaaggaaatatcttcgtttcaaaaccagacagaatcattcccacaaactgcgttgtgatgtgttcgttcaactcacagagtttaacctttcttttcatagagcagttaggaaaaactctgtttgtaaattctgtaagtggatattctgacatcttgtggccttctttggaaacgagatttcttcatattctgctagacagaagaattctcagtaacttccttgagttgtgtgtattcaactcacagagttgaacgatcctttacacagagcagacttgaaacactctttttgtggaatttgcaactggagatttcagccgcgttgaggtcaatggtagaaaaggaaatatcttcgtataaaaactagacagaatgattctcagaaagtcctttgtgatgtgtgcgttcaactcacagagtttaccctttctgttcatagagcagttaggaaacactctgtttgtaaattctgcaagtggatattcagacctacttgaggtcttcggtggaaacgggatttcttcatattctgctagacagaagagattcccagtaacttcattgtgttgtgtgtgttcaactcacagagttgaactttcatttacacagagcagatttgaaacactctttttgtggaatttgcaaatggagatttcaagcgctttgaggccaaaggcagaaaaggaaatatcttcgtataaaaactagacagaatcattctcagaaactgctgcgtgatgtgtgcgttcaactctcagagtttaacttttcttttcattcagcggtttggaaacactctgtttgtaaagtctgcacgtggatattttgaccacttagaggccttcgttggaaacgggattttttcatgtaaggctagacagaagaattcccagtaacttccttgtgttgtgtgcattcaactcacagagttgaacgttcccttagacagagcagatttgaaacactctatttgtgcaatttgcaattgtagatttcaagcgttttaaggtcaatggcagaaaaggaaatatcttcgtttcaaaactagacagaatgattctcagaaacttctttgtgatgtttgcgttcaactcacagagtttaacctttcttttcatagagcagttaggaaacactctgtttgtaaactctgcaagtggatattcagacctctttgaggccttcgttggaaacgggatttcttcatactatgctagacagaagaattctcagtaacttccttgggttgtgtgtattcaactcacagagttgaacgatcctttacacagagcagacttgaaacactctttttgtggaatttgcaagtggagatttcagccgctttgaggtcaatggtagaaaaggaaatatcttcgtataaagactagacagagtgattctcagaaactcctttgtgatgtgtgtgttcaactcacagagtttaacctttcttttcaagagcagttagtaaacactctgtttataaagtctgcaagtggatattccgacccctttgagtccttcgttggaaacgggatttcttcatattatgctagacagaagaattcccagtaacttccttgtgttgtgtgtgttcaactcacagagttgaactttcatttgcacagagcagatttgaaacactctttttgtggaatttgcaagtggagatttcaagcgctttgaggccaaaggcagaaaaggaaatatctccgtttcaaaactagacagaatcattctcagaaactgctgcttgatgtgtgcgttcaactctcagagtttaacttttcttttcattcagcggtttggaaacactctgtttgtaaagtctgcacgtggacattttgaccacttagaggccttcgttggaaacgggtttttttcatgtaaggctagacagaagaattcccagtaacttccttgtgttgtatgcattcaactcacagagttgaacgttcccttagacagagcagatttgaaacaatctatttgtgcaatttgcaagtgtagatttcaagcgctttaaggtcaatggcagaaaaggaaatatcttcgtttcaaaactagacagaatcattcccacaaactgcgttgtgatgtgttcgttcaactcacagagtttaacctttctgttcatagagcagttaggaaacactctgtaaagtctgtaagtggatattctgacatcttgtggccttcgttgtaaacgggatttcttcatattctgctagacagaagaattctcagtaacttccttgtgttgtgtttattcaactcacagagttgaatgatcctttacacagagtagacttgaaacactctttttgtggaatttgcaagtggagatttcagccgctttgaggtcaatggtagaaaagtaaatatcttcctataaagactagacagaatgattctcagaaactcctttgtgatgtgtgcgttcaactcacagagtttaacctttctgttcatagagccgttaggaaacactctgtttgtaaagtctgcaagtggatattcagacctctttgaggccttcgttggaaacgggatttcttcatattatgctagacagaagaattctcagtaacttccttgtgttgtgtgtattcaactgacagagttgaactttcatttagagagagcagatttgaaacactgtttttgtgggatttgcaagtggagatttcaagcgctttggggccaaaggcagaaaaggaaatatcttcgtataaaaactagacagaatcattctcagaaactgctgcgtgatgtgtgcgttcaactctcagagtttaacttttcttttcattcagcggtttggaaacactctgtttgtaaagtctgcacgtggaaattttgaccacttagaggccttcgttggaaacgggtttttttcatgtaaggctagacagaagaattcccagtaacttccttgtgttgtgtgcattcaacttacagagttgaacgttcccttagacagagcagatttgaaacactctatttgtgcaatttgcaattgtagatttcaagcgctttaaggtcaagggcagaaaaggaaatatcttcgtttcaaaactagacagaatcattcccacaaactgcgttgtgatgtgttcgttcaactcacagagtataacctttctgttcatagagcagttaggaaacactctgtttgtaaagtctgtaagtggatattctgacatcttgtggccttcgttggaaacgggatttattcatattctgctagacagaagaattctcagtaacttccttgtgttgtgtgtattcaactcacagagttgaacgatcctttacacagagcagtcttgaaacactctttttgtggaatttgcaagtggagatttctgctgctttgaggtcaatggtagaataggaaatatcttcctatagaaactagacagaatgattctcagaaactcctttgtgatgtgggcgttcaactcacagagtttaacctttcttttcatagagcagttaggaaacactctgtttgtaaagtctacacgtggatatttggacttctttgaggccttcgttggaaacgggtttttttcatgtaaggctagacggaaagaattctcagtaacttccttgtgttgtgtgtattcaactgacagagttgaactttcatttagagagagcagatttgaaacactgtttttgtggaatttgcaagtggagatttcaagcgctttggggccaaaggcagaaaaggaaatatcttcgtataaaaactagacagatcattctcagaaactgctgtgtgatgtgtgcgttcaactctcagagtttaacttttcttttcattcagcggtttggaaacactctgtttgtaaagtctgcacgtggatattttgaccacttagaggccttcgttggaaacgggtttttttcatgtaaggctagacagaagaattcccagtaacttccttgtgttgtgtacattcaactcacagagttgaacgttcccttagacagagcagatttgaaacactctttttgtgcaattgacaagtggagatttcaagcgctttaaggtcaatggcagaaaaggaaatatcttcgtttcaaaactagacagaatcattcccacaaactgcgttgtgatgtgttcgttcaactcacagagtttaacctttcttttcatagagcagttaggaaacagtctctttgaaaattctgtaagtggatattctgacatcttgtggccttcgttggaaacgggatttcttcatattctgctagacagaagaattctcagaaacttccttgtgttgtgtgttttcaactcacagagttgaacgatcctttacacagagcagacttgaaacactccttttgtggaatttgcaagtggagatttcagccgctttgaagtcaatggtagaataggaaatatcttcctatagaaagtagacagaatgattctcagaaactcctttgtgatgtatgcgttcaactcacagagtttaacctttcttttcatagagcagttaggaaacactctgtttgtaaagtctgcaagtggatattcagacctccttgaggccttcgttggaaacgggtttttttcatgtaaggctagacagaagaattcccagtaacttccttgtgttgtgtgtgttcaactcacagagttgaactttcatttacacagagcagatttgaaacactctttttgtggaatttgcaaatggagatttcaagcgctttgtggccaaaggcagaaaaggaaatatcttcgtataaaaactagacagaatcattctcagaaactgctgcgtgatgtgtgcgttcaactctcagagtttaacttttcttttcattcagcggtttggaaaaactctgtttgtatagactgcacgtggatattttgaccacttagaggccttcgttggaaacgggttttttttcatgtaaggctagacagaagaattcccagtaacttccttgtgttgtgtgcattcaactcacagagttgaacgttcccttagacagagcagatttgaaacactctatttgtgcaatttgcaagtgtagatttcaggcgctttaaggtcaacggcagaaaaggaaatatcttcgtttcaaaactagacagaatgattctcagaaactcctttgtgatgtgtgcgttcaactcacagagtttaacctttctgttcaaagagctgttaggaaacactctgtttgtaaagtctgcaagtggatattcagacctccttcaggccttcgttggaaacgggatttcttcatattctgctagacagaagaattctcagtaacttccttgtgttgtgtgttttcaactcacagagttgaacgatcctttacacagagcagacttgaaacactctttttgtggaatttgcaagtggagatttcagccgctttgagctcaatggtagaataggaaatatcttcctatagaaactagacagaatgattctcagaaactcctttgtgatgtgtgcgttcaactcacagagtttaacctttcttttcatagagcagttaggaaacactctgtttgtaaagtctgcaagtagatattcagacatctttgaggccttcgttggaaacgggatttcttcatgttctgctagacagaagaattctcagaaacttccttgtgttgtgtgttttcaactcacagagttgaacgatgctttacacagagtagacttgaaacactctttttgtgtaatttgcaagtggagatttcagccgctttgaggtcaatggtagaaaaggaaatatcttcgaataaaaactagacagaatcattctcagaaactgctgcgtgatgtgtgcgttcaactctcagagtttaacttttcttttcattcagcggtttggaaacactctgtttgtaaagtctgcacgtggatattttgaccacttagaggccttcgttggaaacgggttttttcatgtaaggctagacagaagaattcccagtaacttccttgtgttgtgtgcattcaactcacagagttgaacagttcccttagacagagcagatttgaaacactctatttgtgcaatttgcaagtgtagatttcaagcgctttaaggtcaatggcagaaaaggaaatatcttcgtttcaaaacttgacagaatgattctcagaaactcctttgtgatgtgtgcgttcaactcacagagtttaacctttcttttcatagagcagttaggaagcactctgttagtaaagtctgcaagtggatattcagacctccttgaggccttcgttggaaaggggatttcttcatattatgctagacagaagaattctcagtaacttccttgtgttgtgtgtattcaactcacagagttgaacgatcctttacacagagcagacttgaaacactctttttgtgaaatttgcaagtggagatttcagccgctttgaggtcaatggtagaataggaaatatcttcctatagaaactagacagaatgattctcagaaactcctttgtgatgtgtgcgttcaactcacagagtttaacctttcttttcatagagcagttaggaaacactctgttggtaaagtctgcaagtggatattcagacctctttgaggccttctttggaaacgggatttcttcatattctgctagacagaagaattcccagtaacttccttgtgttgtgtgtgttcaactcacagagttgaactttcatttacacagagcagatttgaaacactctttttgtataatttgcaaatggagatttcaagcgctttgaggccaaaggcagaaaaggaaatatgcttacttataaaaactagacagaatcattctcagaaactgctctgcgatgtgtgcgttcaactctcagagtttaacttttcttttcattcagcagtttggaaacactctgtttgtaaagtctgcacgtggataacttgaccacttagaggccttcgttggaaacgggattttttcatgtaaggctagacagaagaattctcagtaacttccttgtgttgtgtgtattcaactcacagaattgaacgatcctttacacagagcagacttgtaacactctttttgtggaatttgcaagtggagatttcagccgctttgaagtcaaaggtagaaaagtaaatatcttcctataaaaactagacagaatgattctcagaaaatcctttgtgatgtgtgcgttcaactcacagagtttaacatttcttttcatagagcagttaggaaacactctgtttgtaaagtctgcaagtggatattcagacctctttgaggccttctttggaaacgggatttcttcatattctgctagacagaagaattctcagtaacttccttgtgttgtgtgtattcaactcacagagtggaacgatcctttacacagagcagacttgaaacactctttttgtggaatttgcaagtggagatttcagccgctttgaggtcaatagtggaaaaggaaatatcttcgtagaaaaactagacagaatgattctcagaaactcctttgtgatgtgtgtgttcaactcacagagtttaacctttcttttcatagagcagttagtaaacactctgtttataatgtctgcaagtggatattcagacccctttgaggccttcgttggaaacgggatttcttcatattctgctagacagaagaattcccagtaacttccttgtgttgtgtggattcaactcacagagttgaactttcatttacacagagcagatttgaaacactctttttgtggaatttgcaaatggagatttcaagccctttcaggccaaaggcagaaaaggaaatatcttcgtataaaaactagacagaatcattctcagaaactgctctgcgatgtgtgcgttcaactctccgagtttaacttttcttttcattcagcagtttggaaacactctgtttgtaaagtctgcacgtggataatttgaccacttagaggccttctttggaaacggtttttttttcatgtaaggctagacagaagaattcccagtaacttccttgtgttgtgtgcattcaactcacagagttgaacgttccctagacggagcagatttgaaacactctatttgtgcaatttgcaagtgtagatttcaagcgctttaaggtcaatggcagaaaagggaatatcttcgtttcaaaactagacagaatcattcccacaaactgcgttgtgatgtgtgcgttcaactcacagagtttaacttttcttttcatagagcagttaggaaacactctgtttgtaaagtctgcaagtggatattcagacctctttgaggccttcgttggaaacgggatttcttcatattctgctagacagaagattctcagtaacttccttgtgttgtgtgtattcaactcacagagttgaacgatcctttacacagagcagacttgaaacactctttttgtggaatttgcaagtggagatttcagccgctttgaggtcaatagtagaaaaggaaatatcttcgtagaaaaactagacagaatgattctcagaaactcctttgtgatgtgtgcgttcaacacacagagtttaacttttcttttcatagagcagttagtaaacactctgtttataacgtctgcaagtggatattcagacccctttgaggccttcgttggaaacgggatttcttcatattatgctagacagaagaattcccagtaacttccttgtgttgtgtgtgttcaactcacagagttgaactttcatttacacagagcagatttgaaacactctttttgtggaatttgcaagtggagatttcaagcgctttgaggccaaaggcagaaaaggaaatatcttcgtaaaaaaatagacagaatcattctcagaaactgctctgcaatgtgtgcgttcaactctcagagtttaacttttcttttcattcagcagtttggaaacactctgtttgtaaagtctgcacgtggataacttgaccacttagaggccttcgttggaaacgggtttttttcatgtaaggctagacagaagaattcccagtaacttccttgtgttgtgtgcattcaactcacagagttgaacgttcccttggacagagcagatttgaaacactctatttgtgcaatttgcaagtgtagatttcaagcgcattaaggtcaatggcagaaaaggaaatatcttcgtttcaaaactagacagaatgattctgagaaactcctttgtgatgtgtgcgttcaactcacacagtttaacctttcttttcatagagcagttaggaaacactctgtttgtaaagtctgcaagtggatattcagacttctttgaggccttcgttggaagcgggatttcttcatattctgctagacagaagaattctcagtaacttccttgtgttgtgtgtattcaactcacagaggtgaacgatcctttacacagagcagacttgaaacactctttttgtggaattgcaagtggagatttcagccgctttgaggtcaatggtagaaaaggaaatatcttcgtataaagactagacagaatgattctaagaaaatcttttgtgatgtgtgcgttcaactcacagagtttaacttttcttctcatagagcagttaggaaacactctgtttgtaaagtgtgcaagtggatattcagacctctttgaggccttcgttggaaaagggatttcttcatattatgctagacagaagaattctcagtaacttccttggtgttgtgtgtattcaaatgacagagttgaactttcatttagagagagcagatttgaaacactgtttttgtggaatttgcaagtggagatttcaagcgctttggggccaaaggcagaaaaggaaatatcttcgtataaaaactagacagaatcatcctcagaaactgcactgtgatgtgtgcgttcaactctcagtgtttaacttttcttttcattcagcagtttggaaacactctgtttgtaaagtctgcacgtggatattttgaccacttagaggccttcgttggaaacgggtttttttcatgtaatgctaggcagaagaattcccagtaacttccttgtgttgtgtgcattcaactcacagagctgaactttcccttagacagagcagatttgaaacactctatttgtgcaatttgcaagtgtagatttcaagcgctttaaggtcaatggcagaaaaggaaatatcttcgtttcaaaactagacagaatcattcccacaaacagcgttgtgatgtgttcgttcaactcacagagtttaacctttcttttcatagagcagttaggaaacagtctgtttgtcaattctgtaagtggatattctgacatcttgtggcattcgttggaaacgggatttcttcatattctgctagacagaagaattctcagtaacttccttgtgttgtgtgtattcaactcacagagttgaacgatcctttacacagagcagacttgaaacactctttttgtggaatttgcaagtggagatttcagccgctttcaggtcaatggtagaataggaaatatcttcctatagaaactagacagaatgattctcagaaactcctttgtgatgtgtgcgttcaactcacagagtttaacctttcttttcatagagcagttaggaaacactctgtttgtaaagtctgcaagtggatattcagacctctttcaggccttcgttggaaacgggatgtcttcatattatgctagacagaagaattcccagtaacttccttgtgttgtgtgtgttcgactcacagagttgaactttcatttacacagagcagatttgaaacactctttttgtggaatttgcaagtggagatttcaagcgctttgaggccaaaggcagaaaaggaaatatcttcgtataaaaactagacagaatcattctcagaaactgctctgcgatgtgtgcgttcaactctcagagtttaacttttcttttcattcagcagtttggaaacactctgtttgtaaagtctgcacgtggataacttgaccacttagaggcctttgttggaaatgggtttttttcatgtaaggctagacagaagtattctcagtaacttccttgtgttgtgtgtattcaactcacagagttgaacgatcctttacacagagcggacttgtaacactctttttgtggaatttgcaagtggagatttcagccgctttgaagtcaaagttagaaaaggaaataacttcctataaaaactagacagaatcattcccacaaactgcgttgtgatgtgttcgttcatctcacagagtttaacctttcttttcatagagcagttaggaaacactctgtttgtaaattctgtaagtggatattctgacatcttgtggccttcgttggaaacgggatttcttcatattctgctagacagaagaattctcagtaacttccttgtgttgtgtgtattcaactcacagagttgaacgatcctttacacagagcggacttgaaacactcgttttgtggaatttgcaagtggagatttcagccgcgttgaggtcaatggtagaaaagggaatatcttcgtataaaaactagacagagtgattctcagaaactcctttgtgatgtgtgcgttcaactcacagagtttaacctttcttttcatagagcagttaggaaacactctgtttgtaaagtctgcaagtggatattcagacctccttgaggccttcgttggaaacgggatttcttcatattctgctatacagaagaattctcagtaacttccttctgttgtgtgtattcaactgacagagttgaagtttcatttagagagagcagatttgaaacactgtttttgtggaatttgcaagtggagatttcaagcgctttgggaccaaaggcagaaaaggaaatatcttcgtataaaaactagacagaatgattctcagaaactcctttgtgatgtgtgcgttcaactcacagagtttaacctttcttttcatagagcagttaggaaacactctgcttgtaaagtctgcaagtggatattcagccctctttgaggccttcgttggaaacgggtttttttcacataaggctagacagaagaattcccagtaacttccttgtgttgtgtacattcaactcacagagttgaacgttcccttagacagagcagatttgaaacagtctttttgtgcaattggcaaatggagatttcaagcgctttaaggtcaatggcagaaaaggaaatatcttcgtttcaaaactagacagaatcattcccacaaactgcgttgtgatgtgttcgttcaactcacagagtttaacctttctgttcatagagcagttaggaaacactctgtttgtaaagtctgtaagtggatatactgacatcttgtggccttcgttggaaacgggatttcttcatattctgctagacagaagaattctcagtaacttccttgtgttgtgtgtattcaactcacagagttgaacgatcctttacacagagcagacttgtaacactctttttgtggaatttgcaagaggagatttcagccgctttgaagtcaaaggtagaaaaggaaatatcttcctataaaaactagacagaataattctcagaaactcctttgtgatgtgtgcgttcaactcacagagtttaacctttcttttcatagagcagttaggaaacactctgtttgtaaagtctgcaagtggatattcagacctctttgaggccttcgttggaaacgggtttttttcatataaggctagacagaagaattcccagtaacttccatgtgttgtgtgtgttcaactcacagagttgaactttcattttcacagagcagatttgaaacactctttttgtggaatttgcaaatggagatttcaagcgctttgaggccaaaggcagaaaaggaaatatcttcgtataaaaactagacagaatcattctcagaaactgctgcgtgatgtgtgctttcaactctcagagtttaacttttcttttcattcagcggtttggaaacactctgtttgtaaagtctgcacgtggatattttgaccacttagaggccttcgttggaaacgggtttttttcatgtaaggctagacagaagaattcccagtaacttccttgtgttgtgtacattcaactcacagagttgaacgttcccttagacagagcagatttgaaacactctttttgtgcaattggcaaatggagatttcaagcgctttaagttcaatggcagaaaaggaaatatcttcgtttcaaaactagacagaatcattcccacaaactgcgttgtgatgtgttcgttcaactcacagagtttaacctttctgttcatagaggagttaggaaacactctgtttgtaaagtctgtaagtggatattctgacatcttgtggccttcgttggaaacgggatttcttcatattctgctagacagaagaattctcagtaacttccttgtgttgtgtgtattcaactcacagagttgaacgatcctttacacagagcagacttgaaacactctttttctggaatttgcaagtggagatttcagccgctttgaggtcaattgtagaaaaggaaatatcttcgtataaaaactagacagaatgattctcagaaactcctttgtgatgtctgcgttcaactcacagagtttaacctttcttttcatagagcagttaggaaacactctgtttgtatagtctgcacgtggatatttggacttctttgaggccttcgttggaaacgggtttttttcatgtaaggctagacagaagaattctcagtaacttccttctgttgtgtgtattcaactgacagagttgaactttcatttagagagagcagatttgaaacactgtttttgtggaatttgcaagtggagatttcaagcgctttggggccaaaggcagaaaaggaaatatccttcgtataaaaactagacagaatcattctcagaaactgctctgcgatgtgtgcgttcaactctcagagtttaagttttcttttcattcagcagtttggaaacactctgtttgtaaagtctgcacgtggatattttgaccacttagaggccttcgttggaaacgggtttttttcctgtaaggctagacagaagaattcccagtaacttccttgtgttgtgtacattcaactcacagagttgaaagttcccttagacacagcagatttgaaacactctttttgtgcaattggcaaatggagatttcaagcgctttaaggtcaatggcagaaaaggaaatatcttcgtttcaaaactagacagaatcattctcagaaactgctctgcgatgtgtgcgttcaactctcagagtttaacttttcttttcattcagcagtttggaatcactctgtttgtaaagtctgcacgtacataatttgaccacttagaggccttcgttggaaacaggtttttttcatgtaaggctagacagaagaattctcagtaacttccttgtgttgtgtgtattcaactcacacagttgaacgatcctttacacagagcagacttgtaacactctttttgtggaatttgcaagtggagatttcagccgctttgaagtcaaaggtagaaaaggaaatatcttcctataaaaactagacagaatgattctcagaaacttctttgtgatgtgtgcgttcaactcacagagttcaacctttcttttcatagagcagttaggaaacactctatttgtaaactctgcaagtggatattcagacctctttgaggccttcgttggaaacgggatttcttcatactatgctagacagaagaattctcagtaacttccttgtgttgtgtgtattcaactgacagagttgaactttcatttagagagagcagatttgaaacactgtttttgtggaatttgccagtggagatttcaagcgctttggggccaaaggcagaaaacgaaatatcttcgtataaaaactagacagagtcattctcagaaactgctctgtgatgtgtgcgttcaactctcagagtttaacttttcttttcattcagcagtttggaaacactctgtttgtaaagtctgcacgtggataatttgaccacttagaggccttcgttggaaacgggtttttttcatgtaaggctagacagaagaattcccagtaacttccttgcgttgtgtacattcaactcacagagttgaacgttcccttagacagagcagatttgaaacactctttttgtgcaattggcaagtggagatttcaagcgctttaaggtcaatggcagaaaaggaaatatcttcgtttcaaaactagacagaatcattcccacaaactgcgttgtgatgtgttcgttcaactcacagagtttaacctttcttttcatagagcagttaggaaacactctgttgttaaattctgtaagtggatattctgacatcttgtggccttcgttggaaacgggatttctacatattctgccagacagaacaattctcagtaacttccttgtgttgtgtgtattcaactcacagagttgaacgatcctttacagagagcagacttgaaacactctttttgtggaatttgcaagtggagatttcagccgctttgaggtcaatggtagaataggaaatatcttccaatagaaactagacagaatgattctcagaaactcctttgtgatgtgtgtgttcaactcactgagtttaacctttcttttcatagagcagttaggaaacactctgtttgtaaagtctgcaagtggatattcagacctctttgaggccttcgttggaaacgggattttttcatataaggctagacagaggaattcccagtaacttccttgtgttgtgtgtgttcaactcacagagttgaactttcatttacacagagcagatttgaaacactctttttgtggaatttgcaagtggagatttcaagcgctttgaggccaatgcagaaaaggaaatatcttcgtataaaaactagacagaatcattctcagaaactgctctgcgatgtgtgcgttcaactctcagagtttaacttttcttttcattcagcagtttggaaacaatctgtttgtaaagtctgcacgtggataatttgaccacttagaggccttcgttgcaaacgggtttttttcctgtaaggctagacagaagaattcccaggaacttccttgtgttgcgtacattcaactcacacatttgaacgttcccttagacagagtagatttgaaacactctttttgtgcaattggcaagtggtgatttcagccgctttgaggtcaatggtagaaaaggaaatatcttcatataaaaactagacagataatcattcccacaaactgcgttgtgatgtgttcgttcaactcacagagtttaacctttctgttcatagagcagttaggaaacactctgtttgtaaagtctgtaagtggatattctgacatcttgtggccttcgttggaaacgggatttcttcctattctgctagacagaagaattctcagtaacttccttgtgttgtgtgtattcaactcacagagttgaacgatcctttacacagagcagacatgtaacactctttttctggaatttgcaagtggagatttcagccgctttgaagtcaaaggtagaaaaggaaatatcttcctataaaaactagacagaatgattctcagaaactcctttgtgatgtgtgcgttcaactcacagagtttaacctttcttttcatagagcagttaggaaacactctgtttgtaaagtctgcaagtggatattcagacctctttgaggccttcgatggaaacgggatttcttcatattctgctagacagaagaattctcagtaacttccttgtgttgtgtgtattcaactcacagagttgaacgatcctttacacagggcagacttgaaacactctttttggggaatttgcaagtggagatttcagcctctttgaggttaatggtagaaaatgaaatatcttcgtatagaaactagacagaatcattctcagaaactgctctgtgatgtgtgcgttcaactctcagagtttaacttttcttttcattcagcagtttggaaacactctgtttgtaaagtctccacgtggataatttgaccacttagaggccttcgttggaaacgggtttttttcatgtaaggctagacagaagaattcccagtaacttccttgtgttgtgtacattcaactcacagagctgaacgttcccttagacagagcagatttgaaacactctttttgtgcaattggcaagtggtgatttcagctgctttgaggtcaatggtagaaaagggaatatcttcgtataaaaactagacagaatcattctcagaaactgctctgcgatgtgtgcgttcaactctcagagtttaacttttcttttcattcagcagtttggaaacactctgtttgtaaagtctgcacgtggataatttgaccacttagaggccttccttggaaacgggtttttttcatgtaagtctagacagaagaattcccagtaacttccttgtgttgtgtacattcaactcacagagttgaacgtttccttagacagagcagatttgaaacactctttttgtgcaattggcaagtggtgatttcagccgctttgaggtcaatggtagaaaaggaaatatcttcgtaaaaaaactagacagaatgattctcagaaacttcattgtgatgtgtgcgttcaactcacagagtttaacctttcttttcatagagcagttaggaaacactctgtttgtaaactctgcaagtggatattcacacctctttgaggccttcgttggaaacgggatttcttcatactgtgctagacagaagaattctcagtaacttccttgtgttgtgtgtattcaactcacagagttgaacgatcctttacacagagcagacttgaaacactctttttgtggaatttgcaagtggagatttcagccgcgttgaggtcaatggtagaaaaggtaatatcttcgtataaaaactagacagaatcattctcagaaactgctgcgtgatgtgtgcgttcaactctcagagtttaacttttcttttcattcagcggtttggaaacactctgtttgtaaagtctgcacgtggaaattttgtccacttagaggccttcgttggaaacgggtttttttcatgtaaggctagacagaagaattcccagtaacttccttgtgttgtgtgcattcaactcacagagttgaacgttcccttagacagagcagatttgaaacactctatttgtgcaatttgcaagtgtagttttcaagctctttaaggtcaacggcagaaaaggaaatatcttcgtttcaaaactagacagaatgattctcagaaactcctttgtgatgtgtgcgttcaactcacagagtttaacctttcttttcatagagcagttgggaaacactctgtttgtaaagtctgcaagtggatattcagacctccttgaggctttcgttggaaacgggatttcttcatattctgctagacagaataattctcagtaacttccttgtgttgtgtgtattcaactcacagagttgaacgatcctttacacagagcaaacttgaaacactctttttgtggaatttgcaagtggagatttcagccgctttgaggtcaatggtagaataggaaatatcttcctatagaaactagacagagtgattctcagaaactcctttgtgatgtgtgcgttcaactcacagagtttaacctttcttttcatagagcagttaggaaacactctgtttgtaaagtctgcaagtggatattcagacatccttgaggctttcgttggaaacgggatttcttcatattctgctagaaagaagaattcccagtaacttccttgtgttgtgtgtgttcaactcacagagttgaactttcatttacacagagcagatttgaaacactctttttgtgcaatttgcaagtggagatttcaagcgctttgaggccaaaggcagaaaaggaaatatcttcgtttcaaaactagacagaatcattctcagaaactgctgcgtgatgtgtgcgttcaacactcagagtttaacttttcttttcattcagcggtttggaaacactctgtttgtaaagtctgcacgtggataatttgaccacttagaggccttcgttggaaacgggattttttcatgtaaggctagacagaagaattcccagtaacttccttgtgttgtgtgcattcaactcacagagttgaacgttcccttagacagagcagatttgaaacactctatttgtgcaatttgcaagtgtagttttcaagctctttaaggtcaacggcagaaaaggaaatatcttggtttcaaaactagacagaatgattctcagaaacttctttgtgatgtgtgcgttcaactcacacagtttaacctctcttttcatagagcagttaggaaacactctgtttgtaaagtctgcaagtggatattcagacctccttgaggccttcgttggaaacgggatttcttcatattatgctagacagaagaattctcagtaacttccttgttttgtgtgtattcaactcacagagttgaacgatcctttacacagagcagacttgtaacactctttttgtggaatttgcaagtggagatttcagccgctttgaagtcaaaggtagaaaaggaaatatcttcctataaaaactaaacagataatgattctcagaaactcctttgtgatgtgtgcgttcaactcacagagtttaacctttcttttcatagagcagttagtaaacactctgtttataaagtctgcaagtggatattcagacccctttgaggccttcgttggaaacgggatttcttcatattctgctagacagaagaattctcagtaacttccttgtgttgtgtgtattcaactcacagagttgaactttcatttggagagagcagatttgaaacactgtttttgtggaatttgcaagtggagatttcaagcgctttggggccaaaggcagaaaaggaaatatcttcgtataaaaacgagacagaatcattctcagaaactgctgcgtgatgtgtgcgttcaactctcagagtttaacttttcttttcattcagcggtttggaaacactctgtttgtaaagtctgcacgtggatattttgaccacttagaggccttcgttggaaacgggtttttttcaagtaaggctagacagaagaattctcagtaacttccttgtgttgtgtgtattcaactcacagagttaaacgatcctttacacagaggagacttgtaacactctttttgtggaatttgcaagtggagatttcagccgctttgaagtcaaaggtagaaaaggaaatatcttcctataaaaactagacagaatcattcccacaaactgcgttgtgatgtgttcgttcatctcacagagtttaacctttcttttcgtagagcagttaggaaacagtctgtttgtaaattctgtaagtggatattctgacatcttgtggccttcgttggaaacgggatttcttcatattctgctagacagaagaattctcagtaacttccttgtgttgtgtgtattcaactcacagagttgaatgatcctttacacagaacagtcttgaaacactctttttgtggaatttgcaagtggagatttcatccgctttgaggtcaatggtagaataggaaatatcttcctatagaaactagacagaatgattctcagaaacttctttgtgatgtgtgcgttcaactcacagagtttaacctttcttttcatagagcagttaggaaacactctgtgtgtaaactctgcaagtggatattcagacctgtttgaggccttcgttggaaacgggatttcttcatactatgctagacagaagaattccaagtaacttccttgtgttgtgtgtgttcaactcacagagttgaactttcatttacacagagcagatttgaaacactctttttgtggaatttgcaagtggagatttcaagcgctttgagggcaaaggcagaaaaggaaatatcttcgtttcaaaactagacagaatcattcccacaaactgcgttgtgatgtgttcgttcagctcacagagtttaacctttcttttcatagagcagttaggaaacactctgttggtaaattctgtaagtggatattctgacatcttgtggccttcgttggaaacgggatttcttcatattctgctagacagaagaattcccagtaacttccttgtgttgtgtgcattcaactcacacagttgaacgttccgttagacagagcagatttgaaacactctttttgtgcaatttgcaagtggagatttcaagcgctttagggtcaatggcagaaaaggaaatatcttcgtttcaaaactagacagaatcattcccacaaactgcgttgtgatgtgttcgttcaactcacagagtttaacctttcttttcatagagcagttaggaaatactctgtttgtaaagtctgcaagtggatattcagacctctttgaggccttcgttggaaacgggatttcttcatattctgctggacagaagaattctcagaatcttccttgtgttgtgtgtattcaactcacagagttgaacgatcctttacacagagcagacttgaaacactctttttgtggaatttgcaagtggagatttcagccgctttgaagtcaaaggtagaaaaggaaataacttcctataaaaactagacagaatgattctcagaaactcctttgtgatgtgtgcgttcaactcacacagtttaacctttcttttcatagagcagttaggaaacactctgtttgtaaagtctgcaagtggatattcagacctccttgaggccttcgttggaaacgggatttcttcatattatgctagacagaagaattctcagtaacttccttgtgttgtgtgtattcaactcacagagttgaacgatcctttacacagagcagacttgaaacactctttttgtggaatttgcaagtggagatttcagccgctttgaggtcaatggtagaataggaaatatcttcatatagaaattagacagaatcattctcagaaactgctctgcgatgtgtgtgttcaactctcagagtttaacttttcttttcattcagcagtttggaaacactctgtttgtaaagtctgcacgtggatattttcaccacttagaggccttcgttggaaacgggtttttttcctgtaaggctagacagaagaattcccagtaacttccttgtgttgtgtacattcaactcacagagttgaacgttcccttagacagagcagatttgaaacactctttttgtgcaattggcaaatggagatttcaagcgctttaaggtcaatggcagaaaaggaaatatcttcgtttcaaaactagacagaatgattctcagaaactcctttgtgatgtgtgcgttcaactcacagagttcaacctttcttttcatagagcagttgggaaacactctgtttgtaaagtctgcaagcggatattcagacttctttgaggccttcgttggaagcgggatttcttcatattctgctagacagaagaattctcagtaacttccttgtgttgtgtgtattcaactcacagagttgaacgatcctttacacagagcagacttgaaacactctttttgtggaatttgcaagtggggatttcagccgctttgaggtcaatggtagaataggaaatatcttcctatagaaactagacagaatgattctcagaaactcctttgtgatgtgtgcgttcaactcacagagtttatcctttcttttcatagagcagttaggaaacactctgtttgtaaagtctgcaagtggatattcagacatccttgaggctttcgttggaaacgggatttcttcatattctgctagaaagaagaattctcagtaacttccttgtgttgtgtgtattcaactcacagagttgaacgatccttttcacagagcagacttgaaacactctttttgtggaatttgcaagtggagatttcagccgctttgaggtcaatggtagaataggaaatatcttcctaaagaaactagacagaatcattctcagaaactgctgcgtgatgtgtgcgttcaactctcagagtttaacttttcttttcattcagcggtttggaaacactctgtttgtaaagtctgcacgtggatattcagacctctttgaggccttcgttggaaacgggtttttttcatgtaaggctagacagaagaattcccagtaacttccttgtgttgtgtgcattcaactcacagagttgaacgttcccttagacagagcagatttgaaacactctatttgtgcaatttgcaagtgtagatttcaagcgcattaaggtcaatggcagaaaaggaaatatcttcgtttcaaaattagacagaatcattcccacaaactgcgttgtgatgtgttcgttcaactcacagagtttaacctttctgttcatagagcagttaggaaacactctgtttgtaaagtctgcaagtggatattcagacctccttgaggccttcgttggaaacgggatttcttcatattctgctagacagaagaattctcagtaacttccttgtgttgtgtgtattcaactcacagagttgaccgatcctttacacagagcagacttctaacactctttttgtggcatttgcaagtggagatttcagccgctttgaagtcaaaggtagaaaagggaatatcttcctataaaaactagacagaatgattctcagaaacttctttgtgatgtgtgcgttcaactcacagagtttaacctttcttttcatagagcagttaggaaacactctgtttgtaaagtctgcaagtggatattcagacctctttgaggccttcgttggaaacgggttttttacatataaggctaaacagaagaattccccagtaacttccttgtgttgtgtgtgttcaactcacagagttgaactttcatttacacagagcagatttgaaacactctttttgtggaatttgcaagtggagatttcaagcgctttgaggccaaaggcagaaaaggaaatatcttcgtataaaaactagacagaatcattctcagaaactgctgcgtaatgtgtgcgttcaactctcagagtttaacttttcttttcattcagcggtttggaaacactctgtttgtaaagtctgcacgtggaaattttgaccacttagaggccttcgttggaaacgggtttttttcatgtaaggctagacagaagaattcccagtaacttccttgtgttgtgtgcattcaactcacagagttgaacgttcccttagacagagcagatttgaaacactctatttgtgcaatttgcaagtgtagatttcaagcgctttaaggtcaacggcagaaaaggaaatatcttcgtttcaaaactagacagaatcattcccacaaactgcgttgtgatgtgttcgttcaactcacagagtttaacctttctgttcatagagcagttaggaaacactctgtttgtaaagtctgtaagtggatattctgacaacttgtggccttcgttggaaacgggatttcttcctattctgctagacagaagaattctcagtaacttccttgtgttgtgtgtattcaactcacagagttgaacgatcctttacacagagcagacttgaagcactctttttgtggaatttgcaagtggagattccagcctctttgaggtcaatagtagaaaaggaaatatcttcgtagaaaaactagacagaatgattctcataaactcctttgtgatgtctgcgttcaactcacagagtttaacctttcttttcatagagcagttaggaaacactctgtttgtaaagtctgcaagtggatattcagacctctttgaggccttcgttggaaacgggatttcttcatattatgctagacagaagaattctgagtaacttccttgtgttgtgtgtattcatctgacagagttgaactttcagttagacagagcagaattcaaacactgtttttgtggaatttgcaagtggagatttcaagcgctttggggccaaaggcacaaaaggaaatatcttcgtataaaaattagacagaatcattctcagaaactgctctgcgatgtgtgcgttcaactctcagagtttaacttttcttttcattcagcagtttggaaacactctgtttgtaaagtctgcacgtggataacttgaccacttagaggacttcgttggaaacgggtttttttcctgtaaggctagacagaagaattcccagtaacttccttgtgttgtgtgcattcaactcacagagttgaacgttcccttagacagagcagatttgaaacactctatttgtgcaatttgcaagtgtagttttcaagctctttaaggtcaacggcagaaaaggaaatatcttcgtttcaaaactagacagaatcattcccaaaaactgcgttgtgatgtgttcgttcatctcacagagtttaacctttcttttcatagagcagttaggaaacactctgtttgtaaattctgtaagtggatattctgacatcttgtggccttcgttggaaacgggatttcttcatattctgctagacagaataattcttagtaatttccttgtgttgtgtgtattcaactcacagagttgaaggatcctttacagagagcaggcttgaaacactctttttgtcgaatttgcaagtggagatttcagccgctttgaggtcaatggtagaataggaaatatcttcttatagaaactagacagaatgattctcagaaactcctttgtgatgtgtgcgttcaacacacacagtttaacctttcttttcatagagcagttaggaaacactctgtttgtaaagtctgcaagtggatattcagacctccttgaggccttcgttggaaactggatttcttcatattatgctagacagaagaattctcagtaacttcccttgtgttgtgtgtattcaactgacagagttgaactttcatttggagagagcagatttgaaacactgtttttgtggaatttgcaagtggagatttcaagcgctttggggccaaaggcagaaaaggaaatatcttcgtagaaaaactagacagaatcattctcagaaactgctgcgtgatgtgtgcgttcaactctcagagtttaacctttcttttcattcagcggtttggaaacactctgtttgtaaagtctgcacgtggatattttgaccacttagaggccttcgttggaaacgggtttttttcatgtaaggctagacagaagaattcccagtaacttccttgtgttgtgtacattcaactcacagagttgaacgttcccttagacagagcatatttgaaacactctttttgtgcaattggcaagtggagatttcaagcgctttaaggtcaatggcagaaaaggaaatatcttcgtttcaaaactagacagaatgattctcataaactcctttgtgatgtgtgcgttcaacacacagagtttaacctttctgttcatagagcagttaggaaacactctgtttgtaaagtctgtaagtgcatattctgacatcttgtggccttcgttggaaacgggatttcttcatattctgctagacagaagaattctcagtaacttccttgtgttgtgtgtattcaactcacagggttgaacgatcctttacacagagcagacttgaaacactctttttgtggaatttgcaagtggcgatttcagcctctttgaggtcaatggtagaataggaaatatcttcctatagaaaatagacagaatgattctcagaaactcctttgtgatgtgtgcgttcaactcacagagtttaacctttctttttatagagcagttaggaaacactctgtttgtaaagtctgcaagtggatattcagacctccttgaggccttctttggaaacgggatttcttcctattatgctagacagaagaattctcagtaacttccttgtgttgtgtgtattcaactgacagagttgaactttcatttagagagagcagatttgaaacactgtttttgtggaatttgcaaatggagatttcaagcgctttggggccaaaggcagaaaaggaaatatcttcggtataaaaactagacagaatcattctcagaaactgctctgtgatgtgtgcgttcaactctcaggagtttaacttttcttttcattcagcagtttggaaacactctgtttgtaaagtctgcacgtggataatttgaccacttagaggccttcgttggaaacgggtttttttcatgtaaggctagacagaagaattcccagtaacttccttgtgttgtgtgcattcaactcacagagttgaaagttcccttagacagagcagatttgaaacactctatttgtgcaatttgcaagtgtagatttcaagcgctttaaggtcaacggcagaaaaggaaatatcttcgtttcaaaactagacagaatcattcccacaaactgcgttgtgatgtgttcgttcaactcacagagtttaacctttcttttcatagagcacttaggaaacagtctgtttgtaaattctgtaagtggatattctgacatcttgtgcccttcgttggaaacgggatttcttcatattctgctagacagaagaattctcagaatcttccttgtgttctgtgtattcaactcacagagttgaacgatggtttacacagagcagatttgaaacactctttttgtggaattagcaagtggagatttcagccgctttgaggtcaatggtagaaaaggaaatatcttcgtataaaaactagacagaatgattctcagaaaatcttttgtgatgtgtgcgttcaactcacagagtttaacttttcttctcatagagcagttaggaaacactctgtttgtaaagtctgcaagtggatattcagacctctttgaggccttcgttggaaacgggatttcttcatattatgccagacagaagaattcccagtaacttccttgtgttgtgtttgttcaactcacagagttgaactttcatttacacagagcagatttgaaacactctttttgtggaatttgcaagtggagatttcaagcgctttgaggccaaaggcagaaaaggaaatatcttcgtttcaaaactagacagaatcattctcagaaagtgctctgcgatgtgtgcgttcaactctcagagtttaactttgcttttcattcagcagtttggaaacactctgtttgtaaagtctgcacgtggataatttgaccacttagaggccttcgttggaaacgggtttttttcatgtaaggctagacagaagaattcccagtaacttcccttgtgttgtgtacattcaactcacagagttgaacgttcccttagacagagcagatttgaaacactctttttgggcaattggcaagtggagattacaagcgctttaaggtcaatggcagaaaaggaaatatcttcgtttcaaaactagacagaatcattcccacaaactgcgttgtgatgtggtcgttcaactcacagagcttaacctttctgttcatagagcagttaggaaacactctgtttgtaaagtctataagtggatattctgacatcttgtggccttcgttggaaacgggatttcttcatattctgctagacagaataattctcagtaacttccttgtgttgtgtgtattcaactcagagagttgaacgatcctttacagagagcagacttgaaacactctttttgtggaatttgcaagtggagatttcagccgctttgaggtcaatggtagaaaaggaaatatcttcgtataaagactagacagaatgattctcagaaactcctttgtgatgtgtgcgttcaactcacagagtttaacctttcttttcatagagcagttaggaaacactctgtttctaaagtctgcaagtggatattcagacatctttggggccttcgttggaaacgggatttcttcatgttctgctagacagaagaattcccagtaacttccttgtgttgtgtacattcaactcacagagttgaacgttcccttagacagagcagatttgaaacacactttttgtgcaattggcaagcggagatttcaagcgctttaaggtcaatggcagaaaaggaaatatcttcgtttcaaaactagacagaatcattctcagaaactgctctgcgatgtgtgcgttcaactctcagagtttaacttttcttttcattcagcagcttggaaacactctgtttgtaaagtctgcacgtggatattttgaccacttagaggccttcgttggaaacgggtttttttcctgtaaggctagacagaagaattcccagtaacttccttgtgttgtgtgcattcaactcacagagttgaacgttcccttagacagagcagatttgaaacactctatttgtgcaatttgcaagtgtagatttcaagcgctttaaggtcaatggcagaaaaggaaatatcttcgtttcaaaactagacagaatcattcccacaaactgcgttgtgatgtgttcgttcaactcacagagtttaacctttcttttcatagagcagttaggaaacagtctgtttgtcaattctgtaagtggatattctgacatcttgtggcattcgttggaaacgggatttcttcatattctgctagacagaagaattctcagtaacttccttgtgttgtgtgtattcaactcacagagttgaacgatcctttacacagagcagacttgaaacactctttttgtggaatttgtaagtggagatttcagccgcgttgaggtcaatggtagaaaaggaaatatcttcgtataaaaactagacagaatgattctcagaaactcctttgtgatgtgtgtgttcaactcacagagtttaacctttcttttcatagagcagttaggaatcactctgtttgtaaagtctgcaagtggatattcagacctctttgaggccttcgttggaaacgggtttttttcatataaggctagacagaagaattctcagtaacttcccctgtgttgtgtgtattcaactgacagagtcgaactttcatttagagagagcagatttgtaacactgtttttgtggaatttgcaagtggagatttcaagcgctttggggccaaaggcagaaaaggaaatatcttcgtataaaaactagacagaatcattctcagaaactgctgcgtgatgtatgcgttcaactctcagagtttaacttttcttttcattcagcagtttggaaacactctgtttgtaaagtctgcacgtggatattttgaccacttagaggccttcgttggaaacgggtttttttcatgtaaggctagacagaagaattcccagtaacttccttgtgttgtgtgcattcaactcacagagttgaacgttcccttagacagagcagatttgaaacactctatttgtgcaatttacaagtgtagttttcaagctctttaaggtcaacggcagaaaaggaaatatcttcgtttcaaaactagacagaatgattctcataaactcctttgtgatgtgtgcgttcaactcacagagtttaacctttcttttcatagagcagttaggaaacactctgtttgtaaagtctgcaactggatattcagacctctttgaggccttcgttggaaacgggatttcttcatattctgctagacagaagaattctcagtaacttctttgtgttgtgtgtattcaactcacagagttgaacgatcctttacacagagcagacttgaaacactctttttgtggaatttgcaagtggagatttcagccgctttgaggtcaatggtagaataggaaatatcttcctatagaaaatagacagaatgattctcagaaactcctttgtgatgtgtgcgttcaactcacagagtttaacctttcttttcatagagcagttaggaaacactctgtttgtaaagtctgcaagtggatactcagacctccttgaggccttcgttggaaacgggatttcttcatattatgctagacagaagaattctcagtaacttcccttgtgttgtgtgtattcaactcacagagttgaacgatcctttacagagagcagacttgaaacactctttttgtggaatttgcaagtggagatttcagccgctttgtggtcaatggtagaataggaaatatcttcctatagaaactagacagaatgattctcagaaactcctttgtgatgtgtgcgttcaactcacagagtttaacctttcttttcatagagcagttaggaaacactctgtttgtaaagtctacaagttgatatacagacctctttgaggccttcgttggaaacgggatttcttcatattctgctagagagaagaattcccagtaacttccttgtgttgggtgcattcaactcacagagttgaacgttcccttagacagagcagatttgaaacagcctatttgtgcaatttgcaagtgtagatttcaagcgctttaaggtcaactgcaggaaaggaaatatcttcctttcaaaactagacagaatcattcccacaaactgcgttgtgatgtgttcgttcaactcacagagtttaacctttctgttcatagagcagttaggaaacactctgtttgtaaagtcagtaagtggatattctgacatcttgtggcctttgttggaaacgggatttcttcatattctgctagacagaataattctcagtaacttccttgtgttgtgtgtattcaactcacagtagttgaacgatcctttacagagagcagacttgaaacactctttttgtggaattcgcaagtggagatttcagccgctttgaggtcaatggtagaaaaggaaatgtcttcgtataaagactagacagaatgattctcagaaactcctttgtgatgtgtgcgttcaactcacagagtttaacctttcttttcatagagtagttaggaaacactctgcttgtaaagtctgcaagtggatattcagccctctttgaggccttcgttggaaacgggtttttttcatataaggctagacagaagaattctcagtaacttccttgtgttgtgtgtattcaactgacagagttgaactttcatttagagagagcagatttgaaacactgtttttgtggaatttgcaagtggagatttcaagcgctttggggccaaaggcagaaaaggaaatatcttcgtataaaaactacacagaatcattctcagaaagtgctctgcgatgtgtgcgttcaactctcagagtttaactttgcttttcattcagcagtttggaaacactctgtttgtaaagtctgcacgtggataatttgaccacttagaggccttcgttggaaacgggtttttttcatgtaaggctagacagaagaattcccagtaacttccttgtgttgtgtgcattcaactcacagagttgaacgttcccttagacagagcagatttgaaacactctatttgtgcaacttgcaagtgtagttttcaagctctttaaggtcaacggcagaaaaggaaatatcttcgtttcaaaactagacagaatgattctcagaaactcctttgtgatgtgtgcgttcaactcacagagtttaacttttcttttcaaagagcagttaggaaacactctctttgtaaagtctgcaagtggatattcagacctctttgaggccttcgttggtaacgggatttcttcatattctgctagacagaagaattctcagtaacttccttgtgttgtgtgtattcaactcacagagttgaacgatcctttacacagagcagacttgaaacattctttttgtggaatttgcaagtggagatttcagccgctttgaggtcaatagtagaaaaggaaatatcttcgtagaaaaactagacagaatgattctcagaaactcctttgtgatgtgtgcgttcaactcacagagtttaacctttcttttcatggagcagttaggaaacactctgtttgtaaagtctgcaaggggatattcagacctctttgaggctttcgttggaaacgggatttcttcatattctgctagacagaagaattcccagtaacttccttgtgttgtgtgttttcaactcacagagttgaactttcatttacccagagcagatttgaaacactctttttgtggaatttgcaagtggagatttcaagcgctttgaggccaaaggcagaaaaggaaatatcttcgtttcaaaactagacagaatcattctcagaaactgctgcgtgatgtgtgcgttcaactctcagagtttaacttttcttttcattcagcggtttggaaacactctgtttgtaaagtctgcacgtggatattttgaccacttagaggccttcgttggaaacgggttttcttcatgtaaggctagacagaagaattcccagtaacttccttgtgttgtgtacattcaactcacagagttgaacgttcccttagacagagcagatttgaaacactctttttgtgcaattggcaagtggagatttcaagcgctttaaggtcaatggcagaaaaggaaatatcttcgtttcaaaactagacagaatcattcccacaaactgcgttgtgatgtgttcgttcaactcacacagtttaacctttcttttcatagagcagttaggaaacactctgttggtaaattctgtaagtggatattctgacatcttgtggcctccgttggaaacgggatttcttcatattctgctagacagaataattctcagtaacttccttgtgttgtgtgtattcaactcacagagttgaacgatcctttacagagagcagatttgaaacactctttttgtggaatttgcaagtggagatttcagccgctttgaggtcaaaggtagaatagcaaatatcttcctatagaaactagacagaacgattctcagaaactcctttgtgatgtgtgcgttcaactcacagagtttaacctttcttttcatagagcagttaggaaacactctgtttgaaaagtctgcacgtggatattcagacctctttgaggccttcgttggaaacgggatttcttcctattctgctagacagaagaattcccagtaacttcctagtgttgtgtgtgttcaactcacagagttgaactttcatttacacagaacagatttgaaacactctttttgtggaatttgcaagtggagatttcaagcgctttgaggccaaaggcagaaaaggaaatatcttcgtataaaaactagacagaatcattctcagaaactgctctgcgatgtgtgcgttcaactctcagagtttaacttttcttttcattcagcaatttggaaacagtctgtttgtaaagtctgcacgtggataacttgaccacttagaggccttcgttggaaacgggtttttttcatgtaaggctagacagaagaattcccagtaacttccttgtgttgtgtgcattcaactcacagagttgaacgttcccttagacagagcagatttgaaacactctatttgtgcaatttgcaagtgtagatttcaagcgctttaaggtcaatggcagaaaaggaaatatcttcgtttcaaaactagacagaatgattctcagaaactgctttgtgatgtgtgcgttaaactcacagagtttaacctttcttttcatagagcagttaggaaacactctgtttgtaaagtctgcaagtggatattcagacatctttgaggctttcgttggaaacgggatttcttcatattctgctaggcagaagaattctcagaaacttcgatgtgttgtgtgttttcaactcacagagttcaacgatcatttacacagagtagacttgaaacactctttttgtggaattggcagggtggagatttcagccgctttgaggtcaatggtagaaaaggaaatatcttcgtataaaaactagacagagtgattctcagaaactcctttgtgatgtctgcgttcaactcacagagtttaacctttcttttcatagagcagttaggaaacactctgtttgtaaagtctgcaagcggatattcagacctccttgagggcttcgttggaaacgggatttcttcatattatgctagacagaagaattcccagtaacttccttgtgttgtgtttgttcaactcacagagttgaactttcatttacacagagcagatttgaaacactctttttgtggaatttgcaaatggagatttcaagcgctttgaggccaaaggcagaaaaggaaatatcttcgtataaaaactagacagaatcattctcagaaactgctgcgtgatgtatgcgttccactatcagagtttaacttttcttttcattcagcggtttggaaacactctgtttgtaaagtctgcacgtggatattttgaccacttagaggccttcgttggaaacgggttttttgcatgtaaggctagacagaagaattcccagtaacttccttgtgttgtgtgcattcaactcacagtgttgaacgttcccttagacagagcagatttgaaacactctatttgtgcaatttgcaagtgtagatttcaagcgctttaaggtcaatggcagaaaaggaaatatcttcgtttcaaaactagacagaatcattcccacaaactgcgttgtgatgtgttcgttcacctcacagagtttaacctttctgttcatagagcagttaggaaacactctgtttgtaaagtctgtaagtggatattctgacatcttgtggccttcgttggaaacgggatttcttcatattctgctagacagaagaattctcagtaacttccttgtgttgtgtgtattcaactcacagagttgcaggatcctttacacagagcagacttgaaacactctttttctggaatttgcaagtggagatttcagccgctttgaggtcaatggtagaataggaaatatcttcctatagaaactagacagaatgattctcagaaacttctttgtgatgtgtgcgttcaactcacagagtttaacctttcttttcatagggcagttaggaaacactctgtttgtaaagtctgcaagtggatattcagacctccttgaggccttcgttggaagcgggatttcttcatgttctgctagacagaagaattctcagtaacttccttgtgttgtgtgtattcaactgacagagttgaactttcatttagagagagcagatttgaaacactgtttttgtggaatttgcaagtggagatttcaaacgctttggggccaaaggcagaaaaggaaatatcttcgtatgaaaactagacagaatcattctcagaaactgctctgcgatgtgtgcgttcaactctcagagtttaacttttcttttcattcaacagtttgaaaacactctgtttgtaaagtctgcacgtggatattttgaccacttagaggccttcgttggaaacgggtttttttcttgtaaggctagacagaagaattctcagtaacttccttgtgttgtgtgtattcaactcacagagttgaacgatcctttacacagagcagacttgtaacactctttttgtggaatttgcaagtggagatttcagccgctttgaagtcaaatgtagaaaaggaaatatcttcctataaaaactagacataaggattctcagaaactcctttgtgatgtgtgcgttcaactcacagagtttaatctttctgttcatagagcagttaggaaacactctgtttgtaaagtctgcaagtggatattcagacctccttgaggccttcgttggaaacgggatttcttcatattctgctagacagaagaattctcagtaacttccttgtgttgtgtgtattcaactcacagagttgaacgatcctttacacagagcagacatgaaacactctctttgtggaatttgcaagtggagatttcagccgctttgaggtcaatagcagaaaaggaaatatcttcgtagaaaaactagacagaatgattctcagaatctcctttgtaatgtgtgcgttcaactcacagagtttaacctttcttttcatagagcagttaggaaacactctgtttgtaaagactgcaagtggatattcagacctctttgcggccttcgttggaaacgggatttcttcatattctgctagacagaagaattcccactaacttccttgtgttgtgtgtgttcaactcacagagttgaactttcatttacacagagcagatttgaaacactctttttgtggaatttgcaagtggagatttcaagcgctttgaggccaaaggcagaaaaggaaatatcttcgtttcaaaactatacagaatcattctcagaaacttctctgcgatgtgtgcgttcaactctcagagtttaacttttcttttcattcagcagtttggaaacactctgtttgtaaagtctgcacgtggatattttgaccacttagaggccttcgttggaaacgggtttttttcctgtaaggctagacagaagaattcccagtaacttccttgtgttgtgtacattcaactcacagagttgaacgttcccttagacagagcagatttgaaacactctttttgtgcaattggcaagtggtgatttcagcctctttgaggtcaatggtagaaaaggaaatatcttcgtataaaaactagatagaatgattctcagaaacttcattgtgatgtgtgtgttcaactcacagagtttaacctttcttttcatagagcagttgggaaacagtctgtttgtaaattctgtaagtggatattctgacatcttgtggccttcgttggaaacgggatttcttcatattctgctagacagaagagttctcagtaacttccttgtgttgtgtctattcaactcacagagttgaacgatcctttacacagagcagacttgaaacactctttttgtggaatttgcaagtggagatttcagccgctttgaggtcaatggtagaaaaggaaatatcttcgtataaagactagacagaatgattctcagaaactcctttgtgatgtgtgtgttcaactcacagtgtttaacctttcttttcatagagcagttagtaaacactctgtttataaagtctgcaagtggatattcagacccctttgaggccttcgttggaaacgggatttcttcatattatgctagacagaagaattctcagtaacttccttgtgttgtgtgtattcaactgacagagttgaacgttcatttagagagagcagatttgtaacactgtttttgtggaatttgcaagtggagatttcaagcgctttggggccaaaggcagaaaaggaaatatcttcgtataaaaactagacagaatcattctcagaaactgctctgcgatgtgtgcgtataactctcagagtttaacttttcttttcattcagcagtttggaaacactctgtttgtaaagtctgcacgtggataatttgaccacttagagaccttcgttggaaacgggtttttttcatgtaaggctagacagaagaattcccagtaacttccttgtgttgtgtacattcaactcacagagttgaacgttccctcagacagagcagatttgaaacactctttttgtgcaattggcaaatggatatttcaagcgctttaaggtcaatggcagaaaaggaaatatcttcgtttcaaaactagacagaatgattctcagaaactcctttgtggtgtgtgcgttcaactcacagagtttaacctttcttttcatagagcagttaggaaacactctgtttgtaaagtctgcaagtggatattcagacctctttgaggccttcgttggaaacgggatttcttcatattctgctagacagaagaattctcagtaacttccttgtgttgtgtgtattctactcacagagttgaacgatcctttacacagagcagacttgaaacactctttttgtggaatttgcaagtggagatttcagccgctttgaggtcaatagtagaaaaggaaatatcttcgtagaaaaactaggcagaatgattctcagaaactcctttgtgatgtgtgtgctcaactcacagagtttaacctttcttttcatagagcagttagtaaacactctgtttataaagtctgcaagtggatattcagacccctttgaggccttcgttggaaacgggatttcttcatattatgctagacagaagaattctcagtaacttccttgtgttgtgtgtattcaactcacagagtagaacgatcctttacacagagcagacttgaaacactctttttgtggaatttgcaagtggagatttcaagcgctttgaggccaaaggcagaaaaggaaatatcttcgtataaaaactagacagaatcattctcagaaactgctctgcgatctgtgcgttcaactctcagagtttaacttttcttttcattcagcagtttggaaacactctgtttgtaaagtctacacgtggatattttgaccacttagaggccttcgttggaaacgggtttttttcctgtaaggctagagagaagaattcccagtaacttccttgtgttgtgtacattcaactcacagagttgaacgttcccttagacagagcagatttgaaacactctttttgtgcaattggcaagtggtgatttcaaccgcttttaggtcaatggtagaaaaggaaatatcttcgtataaaaactagacagaatcattcccacaaactgcgttgtgatgtgttcgttcaactcacagagtttaacctttcttttcatagagcagttaggaaacactctgtttgtaaattctgtaagtggatattctgacatcttgtggccttcgttgcaaacgggatttcttcatattctgctagacagaagaattctcagtaacttccttgtgttgtgtgtattcaactcacagagttgaacgatggtttacacagagcagatttgaaacactctttttgtggaatttgcaagtggagatttcagccgctttgaggtcaatggtagaaaaggaaatatcttcgtataaaaactagacagaagcattctcaaaaactcctttgtgaggcttgtgttcaactcccagaggataacattgcttttcatagagcagttttgaaacattcttttcgttgagtctccaagtggacatttggagcgctttcaggcctgtggtggaaaaggaaatatcttcacataaaaactagagagaagaattctcagtaacttccttgtgttgtgtgtattcaactgacagagttgaactttcatttagagagagcagatttgaaacactgtttttgtggaatttgcaagtggagatttcaagcgctttggggccaaaggcagaaaaggaaatatcttcgtttaaaaactagacagaatcattctcagcaactgctgcgtgatgtgtgagttcaactctcagagtttaccttttcttttcattcagcggtttggaaacactctgtttgtaaagtctgcacgtggatattttgaccacttagaggccttcgttggaaactggattttttcatgtaaggctagacagaaaaattcccagtaacttccttgtgttgtgtgcattcaactcacagagttgaacgttcccttagacagagcagatttgaaacactctatttgtgcaatttgcaagtgtagatttcaagcgctttaaggtcaacggcagaaaaggaaatatcttcgttttaaaactagacagaatcattcccacaaactgcgttgtgatgtgttcgttcaactcacagagtttaacctttctgttcatagagcagttaggaaacactctgtttgtaaagtctgtaagtggatattctgacatcttgtggccttcgtttgaaaagggatttcttcatattctgctagacagaagaattctcagaaacttccttgtgttgtgtgttttcaactcacagagttgaacgatgctttacacagagtagacttgaaacactctttttgtgtaatttgcaagtggagatttcagccgctttgaggtcaatggtagaataggaaatatcttcctatagaaactagacagaatgattctcagaacctcctttgtgatgtgtgcgttcaactcacagagtttaacctttcttttcatagagcagttaggaaacactctgtttgtaaagtctgcaagtggatattcagacctccttgaggctttcgttggaaacgggatttcttcatattctgctagaaagaagaattcccagtaacttccttgtgttgtgtgtgttcaactcacagagttgaactttcatttacacagagcagatttgaaacactctttttgtggaatttgcaagtggagatttcaagcgctttgaggccaaaggcagaaaaggaaatatcttcgtataaaaaccagacagaatcattctcagaaactgctgcgtgatgtgtgcgtccaactctcagagtttaacttttcttttcattcagcggtttggaaacactctgtttgtaaagtctgcacgtggatattttgaccacttagaggccttcgttggaaacgggtttttttcatgtaaggctagacagaagaattcccagtaacttccttgtgttgtgtgcattcaactcacagagttgaacgttcccttagacagagcagatttgaaacactctatttgtgcaatttgcaagtgtagatttcaagcgctttaaggtcaatggcagaaaaggaaatatcttcgtttcaaaactagacagaatcattcccacaaactgcgttgtgatgtgttcgttcaactttcagagtttaacctttctgttcatagagcagttaggaaacactctgtttgtaaagtctgtaagtggatattctgacatcttgtggccttcgttggaaacgggatatcttcatattctgctagacagaataattctcagtaacttccttgtgttgtgtgtattcaactcacagagttgaacgatcctttacacagagcagacttgaaacactctttttgtggaatttgcaagtggagatttcagccgctttgaggtcaatggtagaaaaggaaactatcttcatataaagactagacagaatgattctcagaaactccgttgtgatgtgtgcgttcaactcacagagtttaacctttcttttcatagagcagttaggaaacactctgtttgtaaagtctgcaagtggatatccagacctctttgaggccttcattggaaacgggatttcttcatattctgctagacagaagaattctcagtaacttccttgtgttgtgtgtattcaactgacagagttgaactttcatttagagagagcagatttgaaacactgtttttgtggaatttgcaagtggagatttcaagcgctttggggccaaaggtagaaaaggaaatatcttcgtataaaaactagacagaatcattctcagaaactgctctgcgatgtgtgcgttcaactctcagagtttaactttgcttttcattcagcagtttggaaacactctgtttgtaaagtctgcacgtcgataatttgaccacttagaggccttcgttggaaacgggtttttttcatgtaaggctagacagaagaattcccagtaacttccttgtgttgtgtgcattcaactcacagagttgaacgttcccttagacagagcagatttgaaacactctatttgtgcaatttgcaagtgtagatttcaagcgctttaaggtcaatggcagaaaaggaaatatcttcgtttcaaaactagacagaatgattctcagaaactcctttgtgatgtgtgcgttcaactcacagagtttaacctttctgttcatagagcagttaggaaacactctgtttgtaaagtctgtaagtggatattctgacatcttgtggccttcgttggaaacgggatttcttcatattctgctagacagaagaattctcagtaacttccttgtgttgtgtgtattcaactcacagagttgaacgatcctttacacagagcggacttgaaacactcgttttgtggaatttgcaagaggagatttcagccgcgttgaggtcaatggtagaaaaggaaatatcttcgtataaaaactagacagaatgattctcagaaactcctttgtgatgtgtgcgttcaactcacagagtttaacctttcttttcatagagcagttaggaaacactctgtttgtaaagtctgcaagtggatattcagacctccttgaggccttcgttggaaacgtgatttcttcatattctgctagacagaagaattcccagtaacttccttgtgttgtgtgtgttcaactcacagagttgaactttcatttacccagagcagatttgaaacactctttttgtggaatttgcaagtggagatttcaagcgctttgaggccaaaggcagaaaaggaaatatcttcgtataaaaactagacagaatcattctcagaaactgctgcgtgatgtgtgcgttcaactctcagagtttaacttttcttttcattcagcggtttggaaacactctgtttgtaaagtctgcacgtggaaattttgaccacttagaggccttcgttggaaacgggttttttcatttaaggctagacagaagaattcccagtaacttccttgtgttgtgtgcattcaactcacagagttgaacgttcccctagacagagcagatttgaaacactctatttgtgcaatttgcaagtgtagttttcaagctcttttaggtcaacggcagaaaaggaaatatcttggtttcaaaactagacagaatcattcccacaaactgcgttgtgatgtgttcgttcaactcacagtgtttaacctttcttttcatagagcagttaggaaacagtctgtttgtaaattctgtaagtggatattcagacctctttgaggccttcgttggcaacgggatttctccatactgtgctagacagaagaattctcagtaacttccttgtgttgtgtgtattcaactcacagagttgaacgatcctttacacagagcagagttgaaacactctttttgtggaatttgcaagtggagatttcagccgctttgaggtcaatggtagaataggaaatatcttcatacagaaactagacagaatgattctcagaaacttctttgtgatgtgtgcgttcaactcacagagtttaacctttcttttcatagagcagttaggaaacactctgtttgtaaactctgcaagtggatactcagacctctttgaggccttcgttggaaacgggatttctccatactgtgatagacagaagaaatcccattaacttccttgtgttgtgtgtgttcaactcacagagttgaactttcatttacacagagcagatttgaaacactctttttgtggaatttgcaagtggagatttcaagcgctttgaggccaaaggcagaaaaggaaatatcttcgtttcaaaactagacagaatcattctcagaaactgctctgcgatgtgtgcgttcaactctcagagtttaactttgcttttcattcagcagtttggaaacactctgtttgtaaagtctgcacgtggataatttgaccacttagaggccttcgttggaaacgggtttttttcatataaggctagacagaagaattcccagtaacttccttgtgttgtgtacattcaactcacagagttgaacgttcccttagacagagcagatttgaaacactctttttgtgcaattggcaaatggagatttcaagcgctttaaggtcaatggcagaaaaggaaatatcttcgtttcaaaactagacaggatcattcccacaaactgcgttgtgatgtgttcgttcaactcacagagtttaacctttcttttcatagagcagttaggaaacagtctgtttgtcaattctgtaagtggatattctgacatcttgtggccttagttggaaacgggatttcttcatattctgctagacagaagaattctcagtaacttcttggtgttgtgtgtattcaactcacagagttgaacgatgctttacacagagcagacttgaaacactcgttttgtggaatttgcaagttgagatttcagccgctttgaggtcaatggtagaaaaggaaatatcttcgtataaaaactagacagaatgattctcagaaactcctttgtgatgtgtgtgttcaactcacagagttaaacctttcttttcatagagcagttaggaaacactctgtttgtaaagtctgcaagtggatattcagacctctttgaggccttcgttggaaacgggtttttttcatataaggctagacagaagaattcccagtaacttccttgtgttgtgtgtgttcaactcacagagttgaactttcatttacacagagcagatttgaaacactctttttgtgggatttgcaggtggagatttcaagcgctttgaggccaaaggcagaaaaggaaatatcttcgtataaaaactagacagactcattctcagaaactgctctgcgatgtgtgcgttcaactctcagagtttaacttttcttttcattcagcagtttggaaacactctgtttgtaaagtctgcacgtggatattttgaccacttagaggccttcgttggaaacggttttctttcctgtaaggctagacagaagaattcccagtaacttccttgtgttgtgtacattcaactcacagagttgaacgttcccttagacagagcagatttgaaacactctttttgtgcaattggcaagtggagatttcaagcgctttaaggtcaatggcagaaaaggaaatatcttcgtttcaaaactagacagaatcattcccacaaactgcgttgtgatgtgttcgttcaactcacagagtttaacctttcttttcatagagcagttaggaaacactctgtttgtaaagtctacaagtggatattcagacctctttgaggccttcgttggaaacgggtttttttcatataaggctagacagaagaattctcagtaacttccttgtgttgtgtgtattcaactcacagagttgaacgatcctttacacagagcagacttgaaacactttttttgtggaatttgcaagtggagatttcagccgctttgaggtcaatagtagaaaaggaaatagcttcgtagaaaaactagacagaattgttctcagaaactcctttgtgatgtgtgcgttcaactcacagagtttaacctttcttttcatagagcagttaggaaacactctgtttgtaaagtctggaagtggatattcagacctccttgaggccttcgttggaaacgggatttcttcatattatgcttgacagaagaattctcagtaacttccttgtgttgtgtgtattcaactgacagagttgaactttcatttagagagagcagatttgaagcactgtttttgtggaatttgcaagtggagacttcaagcgctttgggccaaaggcagaaaaggaaataccttcgtataaaaactagacagaatcattctcagaaactgctgcgtgatgtgtgctttcaactctcagagtttaacttttcttttcattcagcggtttggaaacactctgtttgtaaagtctgcacgtggaaattttgaccacttagaggccttcgttggaaacgggtttttttcatgtaaggccagacagaagaattctcagtaacttcccttgtgttgtgtgtattcaactgacagagttgaactttcatttagagagagcagatttgaaacactgtttttgtggaatttgcaagtggagatttcaagcgttttggggccaaaggcagaaaaggaaatatcttcgtataaaaactaggcagaatcattctcagaaactgctctgcgatgtgtgtgttcaactctcagagtttaacttttcttttcattcagcagtttggaaacactctgtttgtaaagtctgcacgtggataattggaccacttagaggccttcgttggaaacgggtttttttcatgtaaggctatacagaagaattctcagtaacttccttgtgttgtgtgtattcaactcacagagttgaacgatcctttacacagagcagacttgtaacactctttttgtggaatttgcaagtggagatttcagccgctttgaagtcaaaggtagaaaaggaaatatcttcttataaaaactagacagaatgattctcagaaactcctttgtgatgtgagcgttcaactcacagagtttaacctttcttttcatagagcagttaggaaacactctgcttgtaaagtctgcaagtggatattcagccctctttgaggccttcgttggaaacgggtttttttcatatagggctagacagaagaattctcagtaacttccttgtgttgtgtgtattcaactgacagagttgaactttcatttagagagagcagatttgcaacactgtttttgtggaatttgcaagtggagatttcaagcgctttggggccaaaggcagaaaaggaaatatcttcggataaaaactagacagaatcattctcagaaactgctctgcgatgtgtgcgttcaactctaagagtttaacttttcttttcattcagcagtttggaaacactctgtttgtaaagtctgtacgtggataatttgaccacttagaggccttcgttggaaacgggtttttttcatgtaaggatagacagaagaattcccagtaacttccttgtgttgtgtgcattcaactcacagagttgaacgttcccttagacagagcagatttgaaacactctatttgtgcaatttgcaagtgtagttttcaagctctttaaggtcaacggcagaaaaggaaatatcttggtttcaaaactagacagaatgattctcataaactcctttgtgatgtgtgcgttcaactcacagagtttaacctttcttttcatagagcagttaggaaacactctgtttgtaaagtctgtaagtggatattctgacatcttgtggccttcgttggaaacgggatttcttcatattctgctagacagaagaattctcagtaactttcttgtgttgtgtgtattcaactcacagagttgaacgatcctttacagagagcagacttgaaacactctttttgtggaatttgcaagtggagatttcagccgctttgaggtctatggtagaaaaggaaatgtcttcgtataaagactagacagaatgattctcagaaactcctttgtgatgtgtgtgttcaactcacagagtttaacctttcttttcatagagcagttaggaaacactctgtttgtaaagtctgcaagtggatattcagacctctttgaggccttcattggaaacgggtttttttcatagaaggctagacagaagaattcccagtaacttccttgtgttgtgtgtgttcaactcacagagttgaactttcatttacacagagcagatttgaaacactctttttctggaatttgcaagtggagatttcaagcgctttgaggccaaaggcagaaaaggaaatatcttcgtataaaaactagacagaatcattctcagaaactgctctgcgatgtgtgcgttcaactctcagagtttaactttgcttttcattcagcagtttggaaacactctgtttgtaaagtctgcacgtggataatttgaccacttagaggccttcgttggaaacgggtttttttcatgtaaggctagacagaagaattctcagtaacttccttgtgttgtgtgtattcaactcacacagttgaccgatcctttacacagagcagacttgtaacactctttttgtggaatttgcaagtggagatttctgccgctttgaagtcaaaggtagaaaagggaatatcttcctataaaaactagacagaatgattctcagaaactcctttgtgatgtgtgcgttcaactcacagagtttaacctttctgttcatagagctgttaggaaacactctgtttgtaaagtctgcaagtggatattcagacctccttgaggacttcgttggaaacgggatttcttcatattctgctagacagaagaattctcaataacttccttgtgttgtgtgcattcaactcacagagttgaatgatcctttacacagagcagattagaaacactctttttgtggaatttgcaagtggacatttcagccgctttgaggtcaatggtagaaaaggaaatatcttcgtataaaaactagacagaatgattctcagaaactcctttgtgatgtgtgcgttcaactcacagagtttaacctttcttttcatagagcagttaggaaacactctgtttgtaaactctgcaagtggatattcagacctctttgaggccttcgttggaaacgggtttttttcatataaggctagacagaagaattctcagtaacttccttgtgttgtgtgtattcaactgacagagttgaactttcatttagagagagcagatttgaaacactgtttttgtggaatttgcaagtggagatttcaagcgctttggggccaaaggcagaaaaggaaatatcttctgtataaaaactagacagaatcattctcagaaactgctctgcgatgtgtgcgttcaactctcagagtttaacttttcttttcattcagcagtttggaaacactctgtttgtaaagtctgcacgtggatattttgaccacttagaggccttcgttggaaacgggtttttttcctgtaaggctagacagtagaattcccagtaacctccttgtgttgtgtgcattcaactcacagagttgaacgtttccttagacagagcagatttgaaacactctatttgtgcaatttgcaagtgtagatttcaagcgctttaaggtcaatggcagaaaaggaaatatcttcgtttcaaaactagacagaatgattctcataaactcctttgtgatgtgtgcgttcaactcacagagtttaacctttcttttcatagagcagttaggaaacactgtgtttgtaaagtctgcatgtggatattcagacctccttgaggccttcgttggaaacgggaattcctcatattctgctagacagaagaattctcagtaacttccttgtgttgtgtttattcaactcacagagttgaatgatcctttacacagagcagacttgaaacactctttttgtggaatttgcaagtggagatttcagccgctttgaggtcaatggtagaaaaggaaactatcttcatataaagactagacagaatgattctcagaaactcctttgtgatgtgtgcgttcaactcacagcagtttaacctttcttttcatagagcagttaggaaacactctgtttgtaaagtctgcaagtggatattcagacctccttgaggccttcgttggaaacgggtttttttcatataaggctagacagaagaattctcagtaacttccttgtgttgtgtgtattcaactgacagagttgaactttcatttagacagagtagatttgaaacactctttttgtggaatttgcaagtggagatttcaagcgctttgaggccaaaggcagaaaaggaaatatcttcgtataaaaactagacagaatcattctcagaaactgctgcgtgatgtgtgcgttcaactctcagagtttaacttttcttttcattcagcggtttggaaacactctgtgaagtctgcacgtggatattttgaccacttagaggccttcgttggaaacgggtttttttcaagtaaggctagacagaagaattcccagtaacttccttgtgttgtgtgcattcaactcacagagttgaacgttcccttagacagagcagatttgaaacactctatttgtgcaatttgcaagtgtagatttcaagcgctttaaggtcaatggcagaaaaggaaatatctttgtttcaaaactagacagaatcattcccacaaactgcgttatgatgtgttcgttcaactcacagagtttaacctttctgttcatagagcagtgaggaaacactctgtttgtaaagtctgtaagtggatattctgacatcttgtggccttcgttggaaaagggatttcttcctattctgctagacagaagaattctcagtaacttccttgtgttgtgtgtattcaactcacagaattgaacgatcctttacacagagcagacttgaaacactctttttgtggaatttgcaagtggagatttcagccgcgttgaggtcaatggtagaaaaggaaatatcttcgtataaaaactagacagaatgattctcagaaactcctttgtgatgtgtgcgttcaactcacagagttcaacctttcttttcatagagcagttaggaaacactctgtttgtaaagtctgcaagtggatattcagacttctttgaggccttcgttggaagcgggttttcttcatattctgctagaaagaagaattctcactaacttccttgtgttgtgtttattcaactcacagagttgaatgatcctttacacagagcagacttgaaacactctttttgtggaatttgcaagtggagatttcagccgctttgaggtcaatggtagaaaagtaaatatcttcgtataaagactagacagaatgattctcagaaactcctttgtgatgtgtgcgttcaactcacagagtttaacctttctgttcatagagcagttaggaaacactctgtttctaaagtctgcaagtggatattcagacctccttgaggccttcgttggaaacgggatttcttcatattctgctagacagaagaattcccagtaacttccttgtgttgtgtgcattcaactcacagagttgaacgttcccttagacagagcagatttgaaacactctatttgtgcaatttgcaagtgtagatttcaagcgctttaaggtcaacggcagaaaaggaaatatcttcgtttcaaaactatacagaatgattctcagaaaatcttttgtgatgtgtgcgttcaactcacagagtttaacttttcttctcatagaccagttaggaaacactctgtttgtaaagtgtgcaagtggatattcagacctctttgaggccttcgttggaaacgggatttcttcatattctgctagacagaagaattctcagtaacttccttgtgttgtgtgtattcaactcacagagttgaaggatcctttacagagagcaggcttcaaacactctttttgtcgaatttgcaagtggagatttcagccgctttgaggtcaatggtagaataggaaatatcttcttatagaaactagacagaatgattctcagaaacttctttgtgatgtgtgcgttcaactcacagggtttaacctttcttttcatagagcagttaggaaacactctgtttgtaaactctgcaagtggatattcagacctctttgaggccttcgttggaaacgggatttcttcatactgtgctagacagaagaattcccagtaacttccttgtgttgtgtgtgttcaactcacagagttgaactttcatttacacagagcagatttgaaacactctttttgtggaatttgcaagtggagatttcaagcgctttgaggccaaaggcagaaaaggaaatatcttcctataaaaactagacagaatcattctcagaaactgctgcgtgatgtgtgcgttcaactctcagagtttaacttttcttttcattcagcggtttggaaacactctgtttgtaaagtctgcacgtggatattatgaccatttagaggccttcgttggaaacgggttttcttcatgtaaggctagacagaagaattcccagtaacttccttgtgttgtgtgcattcaactcacagagttgaacgttcccttagacagagcagatttgaaacactctatttgtccaatttgcaagtgtagatttcaagcgctttaaggtcaacggcagaaaaggaaatatcttcgtttcaaaactagacagaatgattctcagaaactcctttgtgatgtgtgctttcaactcacagagtttaacctttcttttcatagagcagttaggaaacactctgtgtataaagtctgcaagtggatattcaggcctctttgaggccttcgttggaaacgggatttcttcatatgatgctggacagaagaaatctcagtaacttccttgtgttgtgtgtattcaactcacagagttgaacggtcctttacacagagcagatttgaaacaatgtttttgtggaatttgcaagtggagatttcagccgctttgaggtcaatcgcagaaaaggaaatatcttcttatagaaactagacagaatgattctcagaaactcctttgtgatgtgtgcgttcaactcacagagttcaacctttcttttcatagagcagttaggaaacactctgtttataaactctgcaagtggatattcagacctctttgaggccttcgttggaaacgggatttcttcatattctgctagacagaagaattcccagtaacttccttgtgttgtgtgtgttcaactcacagagttgaactttcatttacacagagcagatttgaaacactctttttgttgaatttgcaagtggagatttcaagcgctttgaggccaaaggcagaaaaggaaatatcttcgtttcaaaactagacagaatcattctcaggaaactgctctgcgatgtgtgcattcaactctcagagtttaacttttcttttcattcagcagtttggaaacactctgtttgtaaagtctgcacgtggatattttgaccacttacaggccttcgttggaaacgggtttttttcctgtaaggctagacagaagaattcccagtaacttccttgtgttgtgtgcattcaactcacagaattgaacgttcccttagacagagcagatttgaaacactctatttgtgcaatttgcaagtgtagatttcaagcgctttaaggtcaacggcagaaaaggaaatatcttcgtttcaaaactagacagaatgattctcagaaactcctttgtgatgtgtgccgttcaactcacagagtttaacctttcttttcatagagcagttaggaaacactctgtttgtaaagtctgcaagtggatattcagacctccttgaggccttcgttggaaacgggttttcttcatattatgctagacagaagaattctcagtaacttccttgtgttgtgtgtattcaactcacagtgttgaacgatcctttacacagagcatacttgaaacactcttgttgtggaatttgcaagtggagatttcagccgctttgaggtcaatggtagaataggaaatatcttcctatagaaactagacagaatgattctcagaaactcctttgtgatgtgtgcgttcaactcacagagttcaacctttcttttcatagagcagttgggaaacactctgtttgtaaagtctgcaagtggatattcagacttatttgaggccttagttggaagcgggatttcttcatgttctgctagacagaagaattcccagtaacttccttgtgttgtgtgtgttcaactcacagagttgaactttcatttacccagagcagatttgaaacactctttttgtggaatttgcaagtggagatttcaagcgctttgaggccaaaggcagaaaaggaaatatcttcgtataaaaactagacagaatcattctcagaaactgctctgcgatgtgtgcgttcaactctcagagtttaacttttcttttcgttcagcagtttggaaacactctgtttgtaaagtctgcacgtggataatttgaccacttagaggccttcgttggaaacgggtttttttcatgtaaggctagacagaataattcccagtaacttccttgtgttgtgtacattcaactcacagagttgaacgttcccttaaacagagcagatttgaaacactctttttgtgcaattggcaagtggagatttcaagcgctttgaggtcaatggcagaaaaggaaatatcttcgtttcaaaactagacagaatcattcccaaaaactgcgttgtgatgtgttcgttcatctcacagagtttaacctttcttttcatagagcagttaggaaacactctgtttgtaaattctgtaagtggatattctgacatcttgtggccttcgttggaaacgggatttcttcatattctgctagacagaagaattctcagaaacttccttgtgttgtgtgtattcaactcacagagttgaacgatcgtttacacagagcagacttgaaacactctttttgtggaatttgtaagtggagatctcagccgctttgaggtcaatggtagaaaaggaaatatcttcatataaaaactagacagaatgattctcagaaactcctttgtgatgtgtgcgttcaactaacagagtttaacctttcttttcatagagcagttaggaaacactctgtttgtaaagtctgcaagtggatattcagacctctttgaggccttcgttggaaacgggttttttcatataaggctagacagaagaattctcagtaacgtccttgtgttgtgtgtattcaactgacagagttgaactttcatttagagagagcagatttgaaacactgtttttgtggaatttgcaagtggagatttcaagcgctttggggccaaaggcagaaaaggaaatatcttcgtataaaaactagacagaatcattctcagaaactgctctgcgatgggtgcgttcaactctcagagtttaacttttcttttcattcagcagtttggaaacactctgtttgtaaagtctgcacgtggatattttgaccacttagaggccttcgttggaaacgggtttttttcctgtaaggctagacagaagaattcccagtaacttccttgtgttgtgtacattcaactcacagagttgaacgttcccttagacagagcagatttgaaacactctttttgtgcaattggcaaatggagatttcaagcgctttaaggtcaatggcagaaaaggaaatatcttcgtttcaaaactagacagaatgattctcagaaactcctttgtgatgtgtgcgttcaactcacagagtttaacctttcttttcatagagcagttaggaaacactgtttgtaaagtctgcaagtggatattcagacctctctgaggccttcgttggaaacgggatttcttcatactgtgctagacagaagaattctcagtaacttccttgtgttgtgtgtattcaactcacagagttgaacgatcctttacacagagcggacttgaaacacactttttgtggaatttgcaagtggagatttcagccgcattgaggtcaatggtagaaaaggaaatatcttcatataaaaaatagacagaatgattctcagaaactcctttgtgatgtgtgttttcaactcacagagtttaacctttcttttcatagagcagttagtaaacactctgtttataaagtctgcaagtggatattcagacccctttgaggccttcgttggaaacgggatttcttcatattatgctagacagaagaattctcagtaacttccttgtgttgtgtgtattcaactgacagagttgaacttgcatttagagagagcagatttgaaacactctttttgtggaatttgcaagtggagatttcaagcgctttggggccaaaggcagaaaaggaaatatcttcgtataaaaactagacagaatcattctcagaaactgctgcgttatgtgtgcgttcaactctcagagtttaacttttcttttcattcagcggtttggaaacactctgtttgtaaagtctgcacgtggatattttgaccacttagaggccttcgttggaaacgggtttttttcatgtaaggctagacagaagaattcccagtaacttccttgtgttgtgtacattcaactcacagagttgaacgttcccttagacagagcagatttgaaacactctttttgtgcaattggcaaatggagatttcaagcgctttaaggtcaatggcagaaaaggaaatatcttcgtttcaaaactagacagaatcattcccacaaactgcgttgtgatgtgttcgttcaactcacagagtttaacctttctgttcatagagcagttaggaaacactctgtttgtaaagtctgcaagtggatattcagacctccttgaggccttcgttggaaacgggatttcttcatattctgctagacagaagaattctcagtaacttccttgtgttgtgtttattcaactcacagagttgaatgatcctttacacagagcagacttgaaacactctttttgtggaatttgcaagtggagatttcagccgctttgaggtcaatggtagaaaagtaaatattttcgtataaagactagacagaatgattctcagaaactcctttgtgatgtgtacgttcaactcacagagtttaacctttcttttcatagagaagttaggaaacactctgtttgtaaagtctgcaagtggatattcagacctctttgaggccttcgttggaaacgtgttttttacatataagtctagacagaagaattcccagtaacttccttgtgttgtgtgtgttcaactcacagagttgaactttgatttacacagagcagatttgaaacactctttttgtggaatttgcaggtggagatttcaagcgctttgaggccaaaggcagaaaaggaaatattcttcgtataaaaactagacagaatcattctcagaaactgctgcgtgatgtgtgcgttcaactctcagagtttaaattttcttttcattcagcggtttggaaacactctgtttgtaaagtctgcacgtggatattttgaccacttagaggccttcgttggaaacgggttttttgcatgtaaggctagacagaagaattcccagtaacttccttgtgttgtgtgcattgaactcacagagttgaacgttcccttagagagggcagatttgaaacactctatttgtgcaatttgcaagtgtagatttcaagcgctttaaggtcaacggcagaaaaggaaatatcttcgtttcaaaactagacagaatcattcccacaaactgtgctgtgatgtgttcgttcaactcacagagtttaacctttctgttcatagagcagttaggaaacactctgtttgtaaagtctgcaagtggatattcagacctccttgaggccttcgttggaaacgggatttcttcatattctgctagacagaagaattctcagtaacttcccttgtgttgtgtgtattcaactcacagagttgaacgatcctttacacagagcagacttgtaacactctttttgtggaatttgcaagtggagatttcagccgctttgaagtcaaaggtagaaaaggaaatatcttcctataaaaactagacagaatgattctcataaactcctttgtgatgtgtgcattcaactcacagagtttaacctttcttttcatagagcagttaggaaacactctgtttgtaaagtctgcaagtggatattcagacctccttgaggccttcgttggaaaagggatttcttcatattctgctagacagaagaattcgcagtaacttccttgtgttgtgtgtgttcaactcacagagttgaactttcatttacacagagcagatttgaaacactctttttgtggaatttgcaggtggagatttcaagcgctttgaggccaaaggcagaaaaggaaatatcttcgtataaaaactagacagaatcattctcagaaactgctctgcgatgtgtgcgttcaactctcagagtttaacttttcttttcattcagcagtttggaaaaactctgtttgtaacgtctgcacgtgcataatttgaccacttagaggccttcgttggaaacgggtttttttcctgtaaggctagacagaagatttctcagtaacttccttgtgttgtgtgtattcaactcacagagttgaaagatcctttacacagagcagactggtaacactctttttgtggaatttgcaagtggagatttcagccgctttgaagtcaaaggtagaaaaggaaataacttcctataaaaactagacagaatcattcccacaaactgcgttgtgatgtgttcgttcaactcacagagtttaacctttctgttcatagagcagttaggaaacactctgtttgtaaagtctgccagtggatattcagacctccatgaggccttcgttggaaacgggatttcttcatattctgctagacagaagaattctcagaatcttccttgtgttgtgtgtattcaactcacagagttgaaccatcctttacacagagcagacttgaaacactctttttgtggaatttgcaagtggagatttcagccgctttgaggtccatggtagaaaaggaaatatcttcgtataaaaactagacagaatgattctcagaaacttctttgtgatgtgtgcgttcaagtcacagagtttaacctttcttttcatagagcagttaggaaacactctgtttgtaaactctgcaagtggatgttcagacctgtttgaggccttcgttggaaacgggatttcttcatactatgctagacagaagaattcccagtaacttccttgtgttgtgtgagttcaactcacagagttgaactttcatttacacagagcagatttgaaacactctttttgtggaatttgcaagtggagatttcaagcgctttgacgccaaaggcagaaaaggaaatatcttcgtataaaaattagacagaatcattctcagaaactgctctgtgatgtctgcgttcaactctcagagtttaacttttcttttcattcagcagtttggaaacactctgtttgtaaagtctgcacgtggatattttgaccacttagaggtcttcgttggaaacgggtttttttcatgtaaggctagacagaagaattcccagtaacttccttgtgttgtgtacattcaactcacagagttgaacgttcccttagacagagtagatttgaaacactctttttgtgcaattggcaagtggagatttcaagcgctttaaggtcaatggcagaaaaggaaatatcttcgtttcaaaactagacagaatcattcccacaaactgcgttgtgatgtgttcgttcaactcacagagtttaacctttcttttcatagagcagttaggaaacagtctgtttgtaaattctgtaagtggatattctgacatcttgtggcctttgttggaaacgggatttcttcatattctgctagacagaagaattctcagaatcttccttgtgttgtgtgtattcaactcacagagttgaacgatcctttacacagagcagacttgaaacactctttttgtggaatttgcaagtggagatttcaagcgctttgaggccaaaggcagaaaaggaaatatcttcgtataaaaactagacagaatgattctcagaatcttctttgtgatgtgtgcgttcaactcacagagtttaacctttcttttcatagagcagttaggaaacactctgtttgtaaactctgcaagtggatattcagacctcattgaggccttcgttggaaacgggatttcttcatactatgctagacagaagaattctcagtaacttccttgtgttgtgtgtattcaactcacagagttgaacgaccctttacacagagcggacttgaaacactctttttgtggaatttgcaagtggagatttcagccgcgttgaggtcaatggtagaaaaggaaatatcttcgtatagaaactagacagaatcattctcagaaactgctctgcgatgtgtgcgttcaactctcagagtttaacttttcttttcattcagcagtttggaaacactctgtttctaaagtctgcacgtggatattttgaccacttagaggccttcgttggaaacgggtttttttcctgtaaggctagacagaagaattcccagtaacttccttgtgttgtgtacattcaactcacagagttgaacgttcccttagacagagcagatttgaaacactctttttgtgcaattggcaaatggagatttcaagggctttaaggtcaatggcagaaaaggaaatatcttcgtttcaaaactagacagaatcattcccacaaactgcgttgtgatgtgttcgttcaactcacagagtttaacctttctgttcatagagcagttaggaaacactctgtttgtaaagtctgtaagtggatattctgacatcttgtggccttcgttgggaacgggatttcttcatattctgctagacagaagaattctcagtaacttcccttgtgttgtgtgtattcaactcacagagttgaacgatcctttacacagagcagacttgaaacattctttttgtggaatttgcaagtggagatttcagccgctttgaggtcaatggtagaataggaaatatcttcatatagaaactagacagaatgattctcagaaactcctttgtgatgtgtgcgttcaactcacagagtttaacctttctgttcatagagctgttaggaaacactctgtttgtaaagtctgcaagtggatattcagacctccttgaggccttcgttggaaacgggatttcttcatattctgctagacagaagaattctcagtaacttccttgtgttgtgtgtattcaactcacagagttgaacgatcctttacagagagcagacttgaaacactctttttgtggaatttgcaagtggatatttcagccgctttgaggtcaatggtagaaaaggaaatatcttcgtataaagactagacagaatcattctcagaaactgctctgcgatgtgtgcgttcaactctcagagtttaacttttcttttcattcagcagtttggaaacactctgtttgtaaagtctgcacgtgaataatttgaccacttagaggccttcgttggaaacgggtttttttcatgtaaggctagacagaagaattcccagtaacttccttgtgttgtgtacattcaactcacagagttgaacgttcccttagacagagcagatttgaaacactctttttgtgcaattggcaagtggagatttcaagcgatttgaggtcaatggcagaaaaggaaatatcttcgtttcaaaactagacagaatcattcccacaaaatgcgttgtgatgtgttcgttcatctcacagagtttaacctttcttttcgtagagcagttaggaaacagtctgtttgtaaattctgtaagtggatattctgacatcctgtggccttcgttggaaacgggatttcttcatattctgctagacagaagaattctcagtaacttccttgtgttgtgtgtattcaactcacagagttgaacgatcctttacacagagcagacttgaaacactctttttgtgaaatttgcaagtggagatttcagccgctgtgagttcaatggtagaataggaaatatcttcctatagaaactagacagaatgattctcagaaactcctttgtgatgtgtgcgttcaactcacagagtttaacctttctgttcatagagctggtaggaaacactctgtttgtaaagtctgcaagtggatattcagacctccttgcggccttcgttggaaacgggatttcttcatattctgctagacagaagaattctcagtaacttctttgtgttgtgtgtattcaactcacagagttgaacgatcctttacacagagcagacttgaaacactctttttgtggaatttgcaagtggagatttcagccgctttgaggtcaatggtagaaaaggaaatatcttcgtataaagactagacagaatcattctcagaaactgctctgcgatgtgtgcgttcaactctcagagtttaacttttcttttctttcagcagtttggaaacactctgtttgtaaagtctgcacgtggatattttgaccacttagaggccttcgttggaaacgggtttttttcctgtaaggctagacagaagaattcccagtaacttccttgtgttgtgtacattcaactcacagagttgaacgttcccttagacagagcagatttgaaacactctttttgtgcaattggcaagtggagatttcaagcgctttgaggtcaatggcagaaaaggaaatatcttcgtttcaaaactagacagaatgattctcataaactcctttgtgatgtgtgcgttcaactcacagagtttaacctttcttttcatagagcagttaggaaacactctgtttgtaaagtatgcaagtggatattcagacctctttcaggccttcgttggaaacgggatttcttcatattatgctagacagaataattctcagtaacttccttgtgttgtgtgtattcaactcacagagttgaacgatcctttacagagagcagacttgtaacactctttttgtggaatttgcaagtggagatttcagccgctttgaggtcaatggtagaataggaaatatcttcctatagaaagtagacagaatgattctcataaactcctttgtgatgtgtgcattcaactcacagagtttcacctttcttttcatagagcagttaggaaacactctgtttgtaaagtctgcaagtggatattcagaccaccttgaggccttcgttggaaacgggatttcttcatattctgctagacagaagaaatcccagtaacttccatgtgttgtgtgtgttcaactcacagagttgaactttcatttacacagagcagatttgaaacactctttttgtggaatttgcaaatggagatttcaaactctttgaggccaaaggcagaaaaggaaatatcttcgtataaaaactagacagaatcattctcagaaactgctgcgtgatgtgtgcgttcaactctcagagtttaacttttgttttcattcagcggtttggaaacacactgtttgtaaagtctgcacgaggatatattgaccacttagaggccttcgttggaaacgggtttttttcatgtaaagctagacagaagaattcccagtaactttccttgtgttgtgtgcattcaactcacagagttgaacgttcccttagacagagcagatttgaaacacactatttgtgcaatttgcaagtgtagatttcaagcgctttaaggtcaatggcagaaaaggaaatatcttcgtttcaaaactagacagaatcattcccacaaactgcgttgtgatgtgttcgttcaactcacagagtttaacctttcttttcatagagcagttaggaaacagtctgtttgaaaattctgtaagtggatattctgacatcttgtggccttcgttggaaacgggatttcttcatattctgctagacagaagaattctcagtaacttccttgtgttgtgtgtattcaactcacagagttgaacgatcctttacacagagcagacttgaaacattctttttgtggaatttgcaagtggagatttcagacgctttgaggtcaatggtagaataggaaatatcttcctatagaaactagacagaacgattctcagaaactcctttgtgatgtgtgcgttcaactcacagagtttaacctttcttttcatagagcagttaagaaacactctgtttgtaaagtctgcaagtggatattcagacctctttgaggccttcgttggaaacgggatttcttcatattctgctagacagaagaattctcagtaacttccttgtgttgtgtgtattcaagtgacagagttgaactttcatttagagagagcagatttgaaacactgtttttgtggaatttgcaattggagatttcaagcgctttggggccaaaggcagaaaaggaaatatcttcgtataaaaactagacagaatcattctcagaaactgctgcgtgatgtgtgcgttcaactctcagagtttaacttttcttttcattcagcggtttggaaacactctctttgtaaagtctgcacgtggatattttgacctcttagaggccttcgttggaaacgggttttttttcatgtaaggctagacagaagaattcccagtaacttccttgtgttgtgtgcattcaactcacagagttgaatgttcccttagacagagcagatttgaaacactctatttgtgcaatttgcaagtgtagatttcaagcgctttaaggtcaatggcagaaaaggaaatatcttcgtctcaaaactagacagaatcattcccagaaactgcgttgtcatgtgttcgttcaactcacagagtttaacctttctgttcatagagcagttaggaaacactctgtttgtaaagtctgtaagtggatattctgacatcttgtggccttcgttggaaacgggatttcttcatattctgctagacagaagaattctcagtaacttccttgtgttgtgtgtattcaactcacagagttgaacgatcctttacacagagcagacttgaaacactctttttgtggaatttgcaagtggagatttcagccgctttgagatcaatggtagaaaaggaaatatcttcgtataaagactagacagaatgattctcagaaactccttttggatgtgtgcgttcaactcacagagtttaacctttcttttcatagagcagttaggaaacactctgtttgtaaagtctgcaagtggatattcagacctctttgaggccttcgttggaaaagggatttcttcattttatgctagacagaagaattctcagtaacttccttgtgttgtgtgtattcaactgacagagttgaactttcatttggagagagcagatttgaaacactgtttttgtggaatttgcaagtggagatttcaagcgctttgggaccaaaggcagaaaaggaaatatcttcgtataaaaactagacagaataattctcagaaactgctgcgtgatgtgtgcgttcaactctcagagtttaacttttcttttcattcagcggtttcgaaacactctgtaaagtctgcacgtggatattttgaccacttagaggccttcgttggaaacgggtttttttcatgtaaggctagacagaagaattcccagtaacttccttgtgttgtgtgcattcaactcacagagttgaacgttcccttagacagagcagatttgaaacactctatttgtccaatttgcaagtgtagatttcaagcgctttaaggtcaacggcagaaaaggaaatatcttcgtttcaaaactagacagaatcattcccacaaactgcgttgtgatgtgttcgttcaactcacagactttaacctttctgttcatagagcagttaggaaacactctgtttgtaaagtctgcaagtggatattcagacctccttgaggccttcgttggaaacgggatttcttcatattctgctagacagaagaattctcagaaacttccttgtgttgtgtaatttcaactcacagagttgaacgatgctttacacagagtagacttgaaacactctttttgtggaatttgcaagtggagatttcagccgctttgaggtcaatttttgaaaaggaaatatcttcgtataaaaactagacagaatgattctcagaaactcctttgtgatgtgtgtgttcaactcacagactttaacctttcttttcatagagcagttaggaaacactctgtttgtacagtctgcaagtggatattcagacatccttgaggctttcgttgaaaacgggatttcttcatattctgctagaaagaagaaattcccagtaacttccttgtgttgtgtgtgttcaactcacagcagttgaactttcatttacacagagcagattggaaacactctttttgtggaatttgcaaggggagatttcaagcgctttgaggccaaaggcagaaaaggaaatatcttcgtataaaaactagacagaatcattctcagaaactgctctgcgatgtgtgcgttcaactctcagagtttaacttttcttttcattcagcagtttggaaacactctgtttgtaaagtctgcacgtggatattttgaccacttagaggccttcgttggaaacggtttttttcctgtaaggctagacagaagaattcccagtaacttccttgtgttgtgtacattcaactcacagagttgaacgttcccttagacagagcagatttgaaacactctttttgtgcaattggcaagtggtgatttcagcctctttgaggtcaatggtagaaaaggaaatatcttcgtataaaaactagacagaacgattctcagaaactcctttgtgatgtgtgtgttcaactcacagagtttaacctttcttttcatagagcagttaggaaacactctgtttgtaaactctgcaagtggatattcagacctctttgaggccttcgttggaaacgggatttcttcctattctgctagacagaagaattctcagtaacttccttgtgttgtgtgtattcaactcaccgagttgaacgatcctttacacagagcagacttgaaacactccttttgtggaatttgcaagtggagatttcagctgctttcaggtcaatagtagaaaaggaaatatcttcgtagaaaaactagacagaatgattctcagaaactcctttgtgatgtgtacgttcaactcacagagtttaacctttgttttcatagagcagttaggaaacactctgtttgtaaagtctgcaagtggatattcagacctctttgaggccttcgttggaaacgggtttttttcatataaggctagactgaagaattctcagtaacttccttgtgttgtgtgtattcaactgacagagctgaactttcatttagagagagcagatttgaaacactgtttttgtggaatttgcaagtggagatttcaagcgctttggggccaaaggcagaaaaggaaatatccttcgtataaaaactagacagaatcattctcagaaactgctctgcgatgtgtgcgttcaactctcagagtttaacttttattttcattcagcagtttggaaacactctgtttgtaaagtctgcacgtggatattttgaccacttagaggccttcgttggaaacgggtttttttcctgtaaggctagacagaagaattcccagtaacttccttgtgttgtgtacattcaactcacagagttgaacgttcccttagacagagcagatttgaaacactctttttgtgcaattggcaaatggagatttcaagcgctttaaggtcaatggcagaaaaggaaatatcttcgtttcaaaactagacagaatcattcccacaaactgcgttgtgaagtgttcgttcaactcacagagtttaacctttcttttcatagagcagttaggaaacagtctgtttgtcaattctgtaagtggatattctgacatcttgtggccttcgttggaaacgggatttcttcatattctgctagacagaataattctcagtaacttctttgtgttgtgtgtattcaactcacagagttgaaggatcctttacagagagcaggcttgaaacactctttttgtcgaatttgcaagtggagatttcagccgctttgaggtcaatggttgaataggaaatatcttcttatagaaactagacagaatgattctgagaaactcctttgtgatgtgtgcgttcaactcacagagtttaacctttcttttcatagagcagttaggaaacactctgtttgtaaagtctgcaagtggatattcagatctccttgaggccttcgttggaaacgggatttcttcatattatgctagacagaagaattcccagtaacttcgttgtgttgtgtgtgttcaactcacagagttgaactttgatttacacagagcagatttgaaacactctttttgtggaatttgcaagtggagatttcaagcgatttgaggccaaaggcagaaaaggaaatatcttcgtataaaaactagacagaatcattctcagaaactgctctgcgatgtgtgcgtttaactctcagagtttaaattttcttttcattcagcagtgtggaaacactctgtttgtaaagtctgcacgtggatattttgaccacttagaggccttcgttggaaacgggtttttttcctgtaaggctagacagaagcattcccagtaacttccttgtgttgtgtgcattcaactcacagagatgaacgttcccttagacagagcagatttgaaacgctctatttgtgcaatttgcaagtgtagatttcaagcgctttaaggtcaatggcagaaaaggaaatatcttcgtttcaaaactagacagaatcattcccacaaactgcgttgtgatgtgttcgttcaactcacagagtttaacctttctgttcatagagcagttaggaaacactctgtttgtaaagtctgtaagtggatattctgacatcttgtggccttcgttggaaacggggtttcttcatattatgctagacagaagaattctcagaaacttctttgtgttgtgtgtatttaactcacagagttgaacgatcctttacacagagcagacttgaaacactctttttgtggaatttgcaagtggagatttcagccgctttgaggtcaacggtagaataggaaatatcttcctatagaaactagacagaatgattctcagaaactcctttgtgatgtgtgtgttcaactcacagagtttaacctttctattcatagagtagttaggaaacactctgtttgtaaagtctgcaagtggatattcagacctactttgaggccttcgttggaaacaggatttcttcatactatgctagacagaagaattcccagtaacttccttgtgttgtgtgtgttcaactcacagagttgaactttcatttacacagagcagatttgaaacactctttttgtggaatttgcaggtggagatttcaagcgctttgaggccaaaggcagaaaaggaaatatcttcgtataaaaactagacagaatcattctcagaaactgctctgcgatgtgtgcgttcaactctcagagtttaacttttcttttcattcagcagtttggaaacactctgtttctaaagtctacacgtggataatttgaccacttagaggccttcgttggaaacgggtttttttcatgtaaggctagacagaagaattcccagtaacttccttgtgttgtgtgcattcaactcacagagttgaacgttcccttagacagagcagatttgaaacactctatttgtgcaatttgcaagtgtagatttcaagcgctttaaggtcaatggcagaaaaggaaatatcttcgtttcaaaactagacagaatcattcccacaaactgcgttgtgatgtgttcgttcaactcacagagtttaacctttctgttcatagagcagttaggaaacactgtgttagtaaagtctgtaagtggatattctgacatcttgtggccttcgttggaaacgggatttcttcatattctgctagacagaagaattctcagtaacttccttgtgttgtgtgtattcaactcacagagttgaacgatcctttacacagagcagacttgaaacactctttttgtggaatttgcaagtggagatttcagccgcattgaggtcaatggtagaaaaggaaatatcttcgtataaaaactagacagaatgattctcagaaactcctttgtgatgtgtgcgttcaagtcacagagtttaacctttcttttcatagagcagttaggaaacactctgtttgtaaagtctgcaagtggatattcagacctctttgaggccttcgttggaaacgggatttcttcatattctgctagacagaagaattctcagtaacttccttgtgttgtgtgtattcaactgacagagttgaactatcatttagagagagcagatttgaaacactgtttttgtggaatttgcaagtggagatttcaagcgctttggggccaaaggcacaaaaggaaatatcttcgtataaaaactagacagaatcattctcagaaactgcagcgcgatgtgtgcgttcaactctcagagtttaacttttcttttcattcagcggtttggaaacactctgtttgtaaagtctgcacgtggaaattttgaccacttagaggccttcgttggaaacgggtttttttcatgtaaggctagacagaagaattcccagtaacttccttgtgttgtgtgcattcaactcacagagttgaacgttcccttagacagagcagatttgaaacactctatttgtgcaatttgcaagtgtagttttcaagctctttaaggtcaacggcagaaaaggaaatatcttggtttcaaaactagacagaatgattctcagaaactcctttgtgatgtgtgcgttcaactcacacagtttaacctttctttccatagagcagttaggaaacactctgtttgtaaagtctgcaagtggatattcagacctctttgaggccttcgttggaaacgggatttcttcatattctgctagacagaagaattctcaggaacttccttgtgttgtgtgtattcaactcacagagttgaacgatactttacacagagcagacttgaaacactctttttgtggaattcgcaagtggagatttcagccgctttgaggtcaatggtagaataggaaatatcttcctatagaaactagacagaatgattctcagaaactcctttgtgatgtgtgccttcaactcacagagtttaacctttcttttcatagagcagttaggaaacactctgcttgtaaagtctgcaagtggatattcagccctctttgaggccttcgttggaaacgggtttttttcatataaggctagacagaagaattctcagtaacttccttgtgttgtgtgtattcaactgacagagttgaactttcatttagagagagcagatttgaaacactgtttttgtggaatttccaatggagatttcaagcgctttggggtcaaaggcagaaaaggaaatatcttcgtataaaaactagacagaatcattctcagaaactgctctgtgatgtgtgcgttcaactctcagagtttaacttttcttttcattcagcagtttggaaacactctgtttgtaaagtctgcacgtggataatttgaccacttagaggccttcgttggaaaagggtttttttcatgtaaggctagacagaagaattcccagtaacttccttgtgttgtgtgcattcaactcacagagttgaacgttcccttagacagagcagatttgaaacactctatttgtgcaatttgcaagtgtagatttcaagcgctttaaggtcaatggcagaaaaggaaatttcttcgtttcaaaactagacagaatcattcccacaaactgcgttgtgatgtgttcgttcaactcacagcagtttaacctttctgttcatagagcagttaggaaacactctgtttgtaaagtctgtaagtggatattctgacatcttgtggccttcgttggaaacgggatttcttcatattctgctagacagaagaattctcagtaacttccttgtgttgtgtgtattcaactcacagagttgaacgatcctttacacagagcagacttgaaacattctttttgtggaatttgcaatggagatttcagccgctttgaggtcaatggtagaataggaaatatcttcctatagaaactagacagaatgattctcataaactcctttgtgatgtgtgcgttcaactcacagagtttaacctttcttttcatagagcagttaggaaacactctgtttgtaaagtatgcaagtggatattcagacctgcttgaggccttcgttggaaacgggatttcttcatattatgctagacagaagaattcccagtaacttccttgggttgtgtgtgttcaactcacagagttgaactttcgtttacacagagcagatttgaaacactctttttgtggaatttgcaggtggagatttcaagcgctttgaggccaaaggcagaaaaggaaatatcttcgtataaaaactagacagaatcattctcagaaactgctctgcgatgtgtgcgttcaactctcagagtttaacttttcttttcattcagcagtttagaaacactctgtttgtaaagtctgcacgtggataatttgaccacttagaggccttcgttggaaacgggtttttttcatgtaaggctagacagaagagttctcagtaacttccttgtgttgtgtgtattcaactcacacagttgaacgatcctttacacagagcagacttgtaacactctttttgtggaatttgcaagtggagatttcagccgctttgaagtcaaagtagaaaaggaaatatcttccaataaaaactagacagaatcattcccacaaactgcgttgtgatgtgttcgttcaactcacagagtttaaccgttcttttcatagagcagttaggaaacagtctgtttgtcaattctgtaagtggatattctgacatcttgtggccttcgttggaaacgggatttcttcatattctgctagacagaagaattctcagaaacttcgttgtgttgtgtgttttcaaatcacagagttcaacgatcctttacacagagtagacttgaaacactctttttgtggaattggcaaggtggagatttcagccgctttgaggtcaatggtagaataggaaatatcttcgtataaaaactagacagaatgattctcagaaactcctttgtgatgtgtgcgttcaactcacagtagtttaacctttcttttcatagagcagttaggaaacactctgtttgtaaagtctgcaagtggatattcagacctctttgaggccttcgttggaaacgggtttttttcatataaggctagacagaagaattcccagtaacttccatgtgttgtgtgtgttcaactcacagagttgaactttcatttacacagagcagatttgaaacactcattttgtggaatttgcaaatggagatttcaagcgctttgaggccaaaggcagaaaaggaaatatcttcgtataaaaattagacagaatcattctcagaaactgctctgcgatgtgtgcgttcaactctcagagtttaacttttcttttcattcagcagtttggaaacactctgtttgtaaattctgcacgtggataatttgaccacttagaggccttcgttggaaacgggtttttttcctgtaaggctagacagagaagattcccagtaacttccttgtgttgtgtacattcaactcacagagttgaacgttcccttagacagagcagatttgaaacactctttttgtgcaattggcaagtggagatttcaagcgctttaaggtcaatggcagaaaaggaaatatcttcgtttcaaaactagacagatcattcccacaaactgcgttgtgatgtgttcgttcaactcacagagtttaacctttcttttcatagagcagttaggaaacagtctgtttgaaaattctgtaagtggatattctgacatcttgtggccttcgttggaaacgggatttcttcatattctgctagacagaagaattctcagtaacttccttgtgttgtgtgtattcaactcacagagttgaacgatcctttacacagagcagacttgtaaaacttttttgtggaatttgcaagtggagatttcagccgctttgaagtcaaaggtagaaaaggaaatatcttcctataaaaactagacagaatgattctcagaaactcctttgtgatgtgtgtgtccaactcacagagtttaacctttcttttcatagagcagttaggaaacactctgtttgtaaagtctgcaagaggatattcagacctctttgaggccttcgttggaaacgggattttttcatataaggctagacagaagaattctcagtaacttccttgtgttgtgtgttttcaactgacagagttgaactttcatttggagagagcagatttgaaacactgtttttgtggaatttgcaagtggagatttcaagcgctttggggccaaaggcagaaaaggaaatatcttcgtataaaaactagacagaatctttctcagaaactgctctgcgatgtgtgcgttcaactctcagagtttaacttttcttttcattcagcagtttggaaacactctgtttgtaaagtctgcacgtggatattttgaccacttagaggccttcgttggaaacgggtttttttcctgtaaggctagacagaagaattctcagtaactttccttgtgttgtgtgtattcaactcacagagttgaacgatcctttacacagagcagacttgagacactctttttgtggaatttgcaagtggagatttcagccgctttgaggtcaatggtagaaaaggaaatatcttcgtataaaaactagacagaatgattctcagaaacttcattgtgatgtgtgcgttcaactcacagagtttaacctttcttttcatagagcagttaggaaacactctgtttgtaaagtctgcaagtggatattcagacctctttgaggccttcgttggaaacgggatttcttcatactgtgctagacagaagaattctcagtaacttccttgtgttgtgtgtattcaactcacagagttgaacgatcctttagagagagcggacttgaaacactctttttgtggaatttgcaagtggagatttcagccgcgttgaggtcaatgatagaaaaggaaatatcttcgtataaaaactagacagaatgattctcagaaactcctttgtgatgtgtgcgttcaactcacagagtttaacctttcttttcatagagcagttaggaaacactctgtttgtaaagtctgcaagtggatactcagacctctttgaggccttctttggaaacggcatttcttcatattatgctagacagaagaattcccagtaacttccttgtgttgtgtgtgttcaactcatagagttgaactttcatttacacagagcagatttgaaacactctttttgtggaatttgcaaatggagatttcaagcgctttgaggccaaaggcagaaaaggaaatatcttcgtataaaaactcgacagaatcattctcagaaactgctctgcgatgtgtgcgttcaactctcagagtttaacttttcttttcattcagcagtttggaaacactctgtttgtaaagtctgcatgtggaaaacttgaccacttagaggccttcgttggaaacgggtttttttcatgtaaggctagacagaagaattcccagtaacttccttgtgttgtgtgcattcaactcacagagatgaacgttcccttagacagagcagatttgaaacactctatttgtgcaatttgcaagtgtagatttcaagcgctttaaggtcaatggcagaaaaggaaatatctttgtttcaaaactagacagaatcattcccacaaactgcgttgtgatgtgttcgttcaactcacagagttttacctttctgttcatagagcagttaggaaacactctgtttgtaaagtctgtaagtggatattctgacatcttgtggccttcgttggaaaagggatttcttcatattctgctagacagaagaattctcagaaacttccttgtgttgtgtgttttcaactcacagagttgaacgacgctttacacagagtagacttgaaacactctttttgtgtaatttgcaagtggagatttcagccgctttgaggtcaatggtagaaaaggaaatatcttcgtataaaaactagacagaatgattctcagaaactcctttgtgatgtgtgcgttcaactcacagagtttaacctttcttttcatagagcagttaggaaacactctgtttgtaaagtctgtaagtggatattcagacctctttgaggccttcgttggaaacgggatttcttcgtattctgctagacagaagaattcccagtaacttccttgtgttgtgtacattcaactcacagagttgaactttgatttacacagagcagatttgaaacactctttttgtggaatttgcaagtggagatttcaagcgctttgaggccaaaggcagaaaaggaaatatcttcgtataaaaactagacagaatcattctcagaaactgctctgcgatgtgtgcgttcaactctcagagtttaacttttcttttcattcagcagtttggaaacactctgtttgtaaagtctgcacgtcgatattttgaccacttagaggccttcgttggaaacgggtttttttcctgtaaggctagacagaagaattcccagtaacttccttgtgttgtgtgcattcaactcacagagttgaacgttccattagacagagcagatttgaaacactctatttgtgcaatttgcaagtgtagatttcaagcgctttaaggtcaatggcagaaaaggaaatatcttcgtttcaaaactagacagaatcattcccacaaactgcgttgtgatgtgttcgttcaactcacagcagtttaacctttctgttcacagagcagtgaggaaacactctgtttgtaaactctgtaagtggatattctgacatcttgtggccttcgttggaaaagggatttcttcatattctgctagacagaaggattctcagtaacttccttgtgttgtgtgtattcaactcacagagttgaacgatcctttacacagagcagacttgaaacactctttttgtggaatttgcaagtggagatttcagccgctttgaggtcaatagtagaaaaggagatatcttcgtataaaaactagacagaatgattctcagaaactcctttgtgatgtgtgcgttcaactcacagagtttaacctttcttttcatagagcagttaggaaacactctgtttgtaaagtctgcaagtggatattcagacctccttcaggccttcgttggaaacgggattttttcatataaggctagacagaagaattcccagtaacttccttgtgttgtgtgtgttcaactcacagagttgaactttcatttacacagagcagatttgaaacactctttttgtggaatttgcaaatggagatttcaagcgctttgaggccaaaggcagaaaaggaaatatctttctataaaaactagacagaatcattctcagaaactgctgcgtgatgtgtgcgttcaactctcagagtttaacttttcttttcattcagcggtttggaaacactctgtttgtaaagtctgcacgtggaaattttgaccacttagaggccttcgttggaaacgggtttttttcatgtaaggctagacagaagaattcccagtaacttccttgtgttgtgtgcattcaactcacagagttgaacgttcccttagacagagcagatttgaaacactctatttgtgcaatttgcaagtgtagttttcaagctctttaagatcaacctgcagaaaaggaaatatcttcgtttcaaaactagacagaatcattcccacaaactgcgttgtgatgtgttcgttcaactcacagagtttaacctttctgttcacagagcagttaggaaacactctgtttgtaaagtctgtaagtggatattctgacatcttgtggccttcgttggaaacgggatttcttcatattctgctagacagaagaattctcagtaacttccttgtgttgtgtgtattcaactcacagagttgaacgatcctttacacagagcagacttgaaacactctttttgtggaatttgcaagtggagatttcagccgcgttgaggtcaatgttagaaaaggaaatatcttcgtataaaaactagacagaatgattctcagaaactcctttgtgatgtgtgcgttcaactcacagagtttaacctttcttttcatagagcagttaggaaacactctgtttgtaaagtatgcaagtggatattcagacctgcttgaggccttcgttggaaacgggatttcttcatattatgctaggcagaagaattctcagtaacttccttgtgttgtgtgtattcaactgacagagttgaactttcatttagagagagcagatttgaaacactgtttttgtggaatttgcaagtggagatttcagccgctttgaggtcaatagtagaaaaggaaatatcttcgtagaaaaactagacagaatgattctcagaaactcctttgtgatgtgggcgttgaactcacagagtttaacctttcttttcatagagcagttaggaaacactctgtttgtaaagtctgcacatggatattttgaccacttagaggccttcgttggaaacgggtttttttcatgtatggctagacagaagaattcccagtaacttccttgtgttgtgtgcattcaactcacagagttgaacgttcccttagacagagcagatttgaaacactctatttgtgcaatttccaagtgtagatttcaagcgctttaaggtcaacggcagaaaaggaaatatcttcgtttcaaaactagacagaatcattcccacaaactgcgttgtgatgtgttcgttcaactcacagtgtttaacctttctgttcatagagcagttaggaaacactctgtttgtaaagtctgtaagtggatattctgacatcttgtggccatcgttggaaacgggatttcttcatattctgctagacagaagaattcccagtaacttccttgtgttgtgtgcattcaactcacagagttgaacgatcctttacacagagcagacttgaaacacactttttgtggaatttgcaagtggagatttcagccgctttgaggttaatggtagaaaatgaaatatcttcgtatagaaactagacagaatgattctcagaaactcctttgtgatgtgtgcgttcaactcacagagtttaacctttcttttcatagagcagttaggaaacactctgtttgtaaagtctgcaagtggatattcagacatccttgaggctttcgtttgaaacgggatttcttcatattctgctagaaagaagaattcccagtaacttccttgtgttgtgtgtgttcaactcacagagttgaactttcatttacacagagcagatttgaaacactctttttgtggaatttgcaagtggagatttcaagcgctttggggccaaaggcagaaaaggaaatatcttcgtttcaaaactagacagaatcattctcagaaactgctctgcgatgtgtgcgttcaactctcagagtttaacttttcttttcattcagcagtttggaaacactctgtttgtaaagtctgcacgtggatattttgaccacttagaggccttctttggaaacgggtttttttcctgtaaggctagacagaagaattcccagtaacttccttgtgttctgtacattcaactcacagagttgaacgttcccttagacagagcagatttgaaacactctttttgtgcaattggcaagtggagatttcaagcgctttaaggtcaatggcagaaaaggaaatatcttcgtttcaaaagtagacagaatcattcccacaaactgcgttgtgatgtgttcgttcaactcacagagtttaacctttctgttcatagagcagttaggaaacactctctttgtaaagtctgtaagtggatattctgatatcttgtggccttcgttggaaacgggatttcttcatattctgctagacagaagaattctcagtaacttcccttgtgttgtgtgtattcaactcacagagttgaacgatcctttacagagagcagacttgaaacactctttttgtggaatttgcaagtggagatttcagccgctttgaggtcaatggtagaaaaggaaatatcttcgtataaagaatagacagaatgattctcagaaacttctttgtgatgtgtgcgttcaactcacagagtttaacctttcttttcatagagcagttaggaaacactctgtttgtaaagtctgcaagtggatattcagacctctttaaggccttcgttggaaacgggtttttttcatataaggctagacagaagaattcccagtaacttccttgtgttgtgtgtgttcaactcacagagttgaactttcattttcacagagcagatttgaaacactctttttgtggaatttgcaaatggagatttcaagcgctttgaggccaaaggcagaaaaggaaatatcttcgtataaaaactagacagaatcattctcagaaactgctgcgtgatgtgtgcgttcaactctcagagtttaacttttcttttcattcagcggtttggaaacactctgtttgtaaagtctgcacgtggaaattttgaccacttagaggccttcgttggaaacgggattttttcatgtaaggctaggcagaagaattcccagtaacttccttgcgttgtgtacattcaactcacagagttgaacgttcccttagacagagcagatttgaaacactctttttgtgcaattggcaagtggagatttcaagcgctttaaggtcaatggcagaaaaggaaatatcttcgtttcaaaactagacagaatcattcccacaaactgcgttgtgatgtgttcgttcaactcacagagtttaacctttctgttcatagagcagttaggaaacactctgtttgtaaagtctgtaagtggatattctgaaatcttgtggccttcgttggaaacgggatttcttcatattgtgctagacagaagaattctcaataacttccttgtgttgtgtgtattcaactcacagagttgaacgatcctttacacagagcggacttgaaacactcgttttgtggaatttgcaagtggagatttcagccacgttgaggtcaatggtagaaaaggaaatatcttcgtataaaaactagacagaatgattctcagaaactcctttgtgatgtgtgcgttcaactcacagagttcaacctttcttttcatagagcagttgggaaacactctgtttgtaaagtctgcaagtggatattcagacttccttgaggccttcgttggaagcgggatttcttcatattctgctagacagaataattctcagtaacttccttgtgttgtgtttattcaactaacagagttgaactttcatttggagagagcagatttgaaacactgtttttgtggaatttgcaagtggagatttcaagcgctttggggccaaaggcagaaaaggaaatatcttcgtataaaaactagacagaatcattctcagaaactgctctgcgatgtgtgcgttcaactctcagagtttaacttttcttttcattcagcagtttggaaacactctgtttgtaaagtctgcacgtggatattttgaccacttagaggccttcgttggaaacgggttttttcctgtaaggctagacaaaagaattcccagtaacttccttgtgttgtgtacattcaactcacagagttgaacgttcccttagacagagcagatttgaaacactctttttgtgcaattggcaagtggagatttcaagcgctttaaggtcaatggcagaaaaggaaatatcttcgtttcaaaactagacagaatgattctcagaaactcctttgtgatgtgtgcgttcaactcacagagtttaacctttcttttcatagagcagttaggaaacactctgtttgtaaagtctgcaagtggatatgcagacttctttgaggccttcgttggaagcgggattgcttcatattctgctatacagaagaattctcagtaacttccttgtgttgtgtgtattcaactcacagagttgaacgatcctttacacagagcagacttgaaacactctttttttggaatttgcaagtggagatttcacccgctttgaggtcaatggtagactaggaaatatcttcctatagaaactagacagaaatgattctcagaaactcctttgtgatgtgtgcgttcaactcacagagtttaacctttcttttcatagagcagttaggaaacactctgtttgtaaagtctgcaagtggatattcagacctctttgaggccttcgttggaaacgggatttcttcatattctgctagacagaagaattctcagtaacttccttgtgttgtgtgtattcaactgacacagttgaactttcatttagagagagctgatttgaaacactgtttttgtggaatttgcaagtggagatatcaagcgctttggggccaaaggcagaaaaggaaatatcttcgtataaaaactagacagaatcattctcagaaactgctgcgtgatgtgtgcgttcaactctcagagtttaacttttcttttcattcagcggtttggaaacactctgtttgtaaagtctgcacgtggatattttgaccacttagaggccttcgttggaaacgggtttttttcatgtaaggctagacagaagaattcccagtaacttccttgtgttgtgtgcattcaactcacagagttgtacgttcccttagacagagcagatttgaaacactctatttgtgcaatttgcaagtgtagatttcaagcgctttaaggtcaatggcagaaaaggaaatatcttcgtttcaaaactagacagaatcattcccacaaactgcgttgtgatgtgttcgttcaactcacagagtttaacctttctgttcatagagcagttaggaaacactctgtttgtaaagtctgcaagtggatattcagacctccttgaggccttcgttggaaacgggatttcttcatattctgctagacagaagaattctcagtaacttccttgtgttgtgtgtattcaactcacagagttgaacgatcctttacacagagcagacttgaaacactctttttgtggaatttgcaagtagagatttcagccgctttgaggtcaatggtagaaaaggaaatatcttcgtataaagactagacagaatgattctcagaaactcctttgtgatgtgtgcgatcaactcacagagtttaacctttcttttcatagagcagttaggaaacactctgtaaagtctgcaagtggatattcagacatccttgaggctttcgttggaaacgggatttcttcatattctgctagaaagaagaattctcagtaacttccttgtgttgtgtgtattcaactcagagttgaacgatcctttacacagagcagacttgaaacactctttttgtggaatatgcaagtggagatttcagccgctttgaggtcaatgttagaataggaaatatcttcctatagaaactagacacaatcattctcagaaactgctctgcgatgtgtgcgttcaactctcagagtttaacttttcttttcattcagcagtttggaaacactctgtttgtaaagtctgcacgtggataatttgaccacttagaggccttcgttggaaacgggtttttttcatgtaaggctagacagaagaattcccagtaacttccttgtgttgtgtgcattcaactcacagagttgaacgttcccttagacagagcagatttgaaacactctatttgtgcaatttgcaagtgtagatttcaagctctttaaggtcaacggcagaaaaggaaatatcttcgtttcaaaactagacagaatcattcccacaaactgcgttgtgatgtgttcgttcaactcacagagtttaacctttcttttcatagagcagttaggaaacagtctgtttgtaaattctgtaagtggatattctgacatgttgtggccttcgttggaaacgggatttcttcatattctgctagacagaagaattctcagtaacttccttgtgttgtgtgtattcaactcacagagttgaacgatcctttacacagagcagacttgaaacattctttttgtggaatttgcaaatggagatttcagccgctttgaggtcaatggtagaataggaaatatcttcctatagaaactagacagaatgattctcagaaactcctttgtgatgtgtgcgttcaactcacagagtttaacctttcttttcatagagcagttagtaaacactctgtttataaagtctgcaagtggatattcagacccctttgaggccttcgttggaaacgggatttcttcatattatgctagacagaagaattctcactaacttccttctgttgtgtgtattcaactgacagagttgaactttcatttagagagagcagatttgaaacactgtttttgtggaatttgcaagtggagatttcaagcgctttcgggccaaaggcagaaaaggaaatatcttcgtataaaaactagacagaaatcattctcagaaactgctctgcgatgtgtgcgttcaactctcagagtttaacttttcttttcattcagcagtttggaaacactctgtttgtaaagtctgcacgtggatattttgaccacttagaggccttcgttggaaacgggtttttttcctgtaaggctaaacagaagaattctcagtaacttccttgtgttgtgtgtattcaactcacagagttgaacgatcctttacacagagcagacttgaaacactctttttgtggaatttgcaagtggagatttcagccgctttggggtcaatggtagaataggaaatatcttcctatagaaactagacagaatgattctcagaaactcctttgtgatgtgtgcgttcaactcacagagtttaacctttcttttcatagagcagttaggaaacactctttttgtaaagtctgcaagtggaaattcagacatccttgaggctttcgttggaaacgggatttcttcatgttctgctagaaagaagaattctcagtaacttccttgtgttgtgtgtattcaactcacagaggtgaacgatcctttacacagagcagacttgaaacactctttttgtggaatttgcaagtggagatttcagccgctttgaggtcaatggtagaaaaggaaatatcttcgtataaagactagacagaatgattctcagaaactcgtttgtgatgggtgcgttcaactcacagagattaacttttcttttcatagagcagttaggaaacactctgtttgtaaagtctgcaagtggatattcagacctctttgtggccttcgttggaaacgggatttcttcatattatgctagacagaagaattcccagtaacttcccttgtgttgtgtgcattcaactcacagagttgaacgttcccttagacagagcagatttgaaacactctatttgtgcaatttgcaagtgtagatttcaagcgcattaaggtcaatggcagaaaaggaaatatcttcgtttcaaaactagacagaatcattcccacaaactgcgttgtgatgtgttcgttcaactcacagagtttaacctttcttatcatagagcacttaggaaacagtctgtttgtaaattctgtaagtggatattctgacatcttgtggccttcgttggaaacgggatttcttcatattctgctagacagaagaattcccagtaacttccttgtgttgtgtgcattcaactcacagagttgaacgttcccttagacagagcagatttgaaacactctatttgtgcaatttgcaagtgtagttttcaagctctttaaggtcaacggcacaaaaggaaatatcttcgtttcaaaactagacagaatcattcccacaaacagcgttgtgatgtgttcgttcaactcacagagtttaacctttcttttcatagagcagttaggaaacagtctgtttgtcaattctgtaagtggatattctgacatcttgtggccttcgttggaaacgggatttcttcatattctgctagacagaagaattctcagtaactttccttgtgttgtgtgtattcaactcacagagttgaacgatcctttacacagagcagacttgaaacactctttttgtggaatttgcaagtggagatttcagccgctttgagttcaatggtagaataggaaatatcttcctatagaaactagacagaatgattctcagaaactcctttgtgatgtgtgcgttcaactcacagagtttaacctttcttttcatagaccagttaggaaacactctgtttttatagtctgtaagtggatattcagacatctttgaggccttcgttggaaacgggatttcttcatattctgctatacagaagaattctcagtaacttccttgtgttgtgtgtattcaactgacagagttgaacattcatttagagagagcagatttgaaacactgtttttgtggaatttgcaagtggagatttcaagcgctttggggccaaaggcagaaaaggaaatatcttcgtataaaaactagacagaatcattctcagaaactgctgcgtgatgtctgcgttcaactctcagagtttaacttttcttttcattcagcggtttggaaacactctctttgtaaagtctgcacgtggatattttgacctcttagacgccttcgttggaaacgggttttcttcatgtaaggctagacagaagaattcccagtaacttccttgtgttgtgtgcattcaactcacagagttgaacgttcccttagacagagcagatttgaaacactctatttgtgcaatttgcaagtgtagatttcaagcgctttaaggtcaatggcagaaaaggaaatttcttcttttcaaaactagacagaaatcattcccacaaactgcgttgtgatgtgttcgttcaactcacagagtttaacctttctgttcatagagcagttaggaaacactctgtttgtaaagtctgtaagtggatattctgacatcttgtggccttcgttgggaacgggatttcttcatattctgctagacagaagaattctcagtaacttccttgtgttgtgtgtattcaactcacagagttgaacgatcctttacacagagcagacttgaaacactctttttgtggaatttgcaagtagagatttcagccgctttgaggtcaatggtagaataggaaatatcttcctatagaaactagacagaatgattctcataaactcctttgtgatgtgtgcgttcaactcacagagtttaacttttcttttcatagagcagttaggaaacactctgtttgtaaagtctgcaagtggatattcagacctctttgaggccttcgttggaaacgggatttcttcatattctgctagacagaagaattcccagtaacttccttgtgttgtgtgtgttcaactcacagagttgaactttcatttacacagagcagatttgaaacactctttttgtggaagttgcaagtggagatttcaagcgctttgaggccaaaggcagaaaaggaaatatcttcgtttcaaaactagacagaatcattctcagaaactgctctgcgatgtgtgcgttcaactctcagagtttaacttttcttttcattcagcagtttggaaacactctgtttgtaaagtctgcacgtggagaatttgaccacttagaggccttcgttggaaacgggtttttttcatgtaaggctagacagaagaattcccagtaactcccttgtgttgtgtacattcaactcacagagttgaacgttcccttagacagagcagatttgaaacactctttttgtgcaattggcaaatggagatttcaagcgctttaaggtcaatggcagaaaaggaaatatcttcgtttcaaaactagacagaatcattcccacaaactgcgttgtgatatgttcgttcaactcacagagtttaacctttcttttcatagagcagttaggaaacagtctgtttgtaaattctgtaagtggatattctgacatcttgtggccttcgttggaaacgggatttcttcacattctgctagacagaagaattctcagtaacttccttgtgttgtgtgtattcaactcacagagttgaacgatcctttacacagagcagacttgaaacactctttttgtggaatttgcaggtggagatttcagccgctttgtgttcaatggtagaataggaaatatcttcctatagaaactagacagaatgattctcagaaaatcctttgtgatgtgtgcgttcaactcacagagtttaacctttcttttcatagagcagttaggaaacactctgtttgtaaagtctgcaagtggatattcagacaactttgaggctttcgttggaaacgggatttcttcatattctgctatacagaagaattctcagtaacttccttgtgttgtgtgtattcaactgacagagttgaactttcatttagacagagcagattagaaacactctttttgtggaatttgcaagtggagatttcaagggctttgaggccaaaggcagaaaaggaaatatcttcgtataaaaactagacagaatcattctcagaaactgctctgcgatgtgtgcgttcaactctcagagtttaacttttcttttcattcagcagtttggaaacactctgtttgtaaagtctgcacgtggataacttgaccacttagaggccttcgttggaaacggttttttttcatgtaaggctagacagaagaattctcagtaacttccttgtgttgtgtgtattcaactgacagagttgaactttcatttagagagagcagatttgaaacactgtttttgtggaatttgcaagtggtgatttcaagcgttttggggccaaaggcagaaaaggaaatatcttcgtataaaaactagacagaatcattctcagaaactgctctgcgatgtgtgcgttcaactctcagagtttaacttttcttttcattcagtagtttggaaacactctgtttgtaaagtctgcacgtggataatttgaccacttagaggccttcgttggaaacgggtttttttcatgtaaggctagacagaagaattctcagtaacttccttgtgttgtgtgtattcaactcacagagttgaacgatcgtttacacagagcagacttgagacactctttttgtggaatttgtaagtggagatttcagccgctttgtggtcattggtagaaaaggaaatatcttcatataaaaactagacagaatgattctcagaaactcctttgtgatgtgtgcgttcaactcacagagtttaacctttcttttcatagagcagttaggaaacactctgtttgtaaagtctccaagtggatattcagacctctttgaggccttcgttggaaacgggttttttcatataaggctagacagaagaattcccagtaacttccttgtgttgtgtgtgttcaactcacagagttgaactttcatttacacagagcagatttgaaacactctttttgtggaatttgcaagtggagatttgaagcgctttgaggccaaaggcagaaaaggaaatatcttcgtataaaaactagacagaatcattctcagaaactgctgcgtgatgtgtgcgttcaactctcagagtttaacttttcttttcattcagcggtttggaaacactctgtttgtaaagtctgcacgtggaaattttgaccacttagaggccttcgttggaaacgggattttttcatgtaaggctaggcagaagaattcccagtaacttcccttgtgttgtgtgcattcaactcacagagttgaacgttcccttagacagagcagatttgaaaaactctatttgtgcaatttgcaagtgtagatttcaagcgctttaaggtcaatggcagaaaaggaaatatcttcgtttcaaaactagacagaatcattcccacaaactgcgttgtgatgtgttcgttcaactcacagagtttaacctttctgttcatagagcagttaggaaacactctgtttgtaaagtctgaaagtggatattctgacatcttgtggccttcgttggaaacgggatttcttcatattctgctagacagaagaattctcagtaacttccttgtgttgtgtgtattcaactcacagagttgaacgatcctttacacagagcagacttgaaacactctttttgtggaatttgcaagtggagatttcagccgctttgaggtcaacggtagaaaaggaaatatcttcgtataaagactagacagaatgattctcagaaacttctttgtgatgtgtgcgttcaactcacagagtttaacctttcttttcatagagcagttaggaaacactctgtttgtaaactctgcaagtggatattcagacctctttgaagccttcgttggaaacgggatttcttcatactatgctagacagaagaattctcagtaacttctttttgttgtgtgtattcaactcacagagttgaacgatcctttacacagagcagacttgaaacactcgttttgtggaatttgcaagtggagatttcagccgcgttgaggtcaatggtagaaaaggaaatatcttcgtataaaaactagacagaatcattctcagaaactgctctgcgatgtgtgcgttcaactctcaagagtttaactttgcttttcattcagcagtttggaaacactctgtttgtaaagtctgcacgtggataatttgaccacttagaggccttcgttggaaacgggtttttttcatgtaaggctagacagaagaattcccagtaacttccttgtgttgtgtacattcaactcacagagttgaacgatcctttacacagagcagacttgtaacactctttttgtggaatttgcaagtggagatttcagccgctttgaagtcaaaggtagaaaaggaaatatcttcctataaaaactagacagaaagattctcagaaactcctttgtgatgtgttcgttcatctcacagagtttaacctttcttttcatagagcagttaggaaacagtctgtttgtaaattctgtaagtggatattctgacatcttgtggccttcgttggaaacgggatttcttcatattctgctagacagaagaattctcagtaacttccttgtgttgtgtgtattcaactcacagagttgaacgatcctttacacaaagcagacttgaaacactctttttgtggaatttgcaagtggagatttcagccgctttgaggtcaatggtagaaaaggaaatatcttcgtataaagactagacagaatgattctcagaaactcttttgtgatgtgtgcgttcaactcacagagtttaacctttctgttcatagagctggtaggaaacactctgtttgtaaagtctgcaagtggatattcagacctccttgaggccttcgttggaaacgggatttcttcatattctgctagacagaagaattctcagaaacttccatgtgttgtgtgttttcaactcacagagttgaacgatgctttacacagagtagacttgaaacactctttttgtgtaatttgcaagtggagatttcagccgctttgaggtcaatggtagaaaaggaaatatcttcgtataaaaactagacagaatgattctcagaaacttctttgtgatgtgtgcgttcaactcacagagtttaacctttcttttcatagagcagttaggaaacactctgtttgtaaactctgcaagtggatattcagacctctttgaggccttcgttggaaacgggatttctccatactgtgctagacagaagaattctcagtaactaccttgtgttgtgtgtattcaactcacagagttgaacgatcctttacacagagcggacttgaaacactcgttttgtggaatttgcaagtggagatttcagccgcgttgaggtcaatggtagaaaaggaaatgtcttcgtataaaaactagacagaatcattctcagaaactgctctgcgatgtgtgcgttcaactctcagagtttaactttgcttttctttcagcagtttggaaacactctgtttgtaaagtctgcacgtggataatttgaccacttagaggccttcgttggaaacgggtttttttcatgtaaggctagacagaagaattcccagtaacttccttgtgttgtgtgcattcaactcacagagttgaacgttcccttagacagagcagatttgaaacactctatttgtgcaatttgcaagtgtagatttcaagcgcattaaggtcaatggcagaaaaggaaatatcttcgtttcaaaattagacagaatcattcccacaaactgcgttgtgatgtgttcgttcaactcacagagtttaacctttcttttcatagagcagttaggaaacactctgttgtaaattctgtaagtggatattctgacatcttggggccttcgttggaaacgggatttcttcatattctgctagacagaagaatgctcagtaacttccgcgtgttgtgtgtattcaactcagagagttgaacgatcctttacacagagcagacttgaaacactctttttgtggaatttgcaagtggagatttcagccgctttgaggtcaatggtagaaaaggaaatatcttcctataaaaactagacagaatgattctcagaaactcctttgtgatgtgtgtgttcaactcacagagtttaacctttctattcatagagtagttaggaaacactctgtttgtaaagtctgcaagtggatattttgacctctttgaggccttcgttggaaacgggtttttttcatgtaaggctagacagaagaattcccagtaacttccttgtgttgtgtgtgttcaactcacagagttgaactttcatttacacagagcagatttgaaacactctttttgtggaatttgcaagtggagatttcaagcgatttgaggccaaaggcagaaaaggaaatatcttcgtataaaaacgagacagaatcatgctcagaaactgctctgcgatgtgtgcgttcaactctcagagtttaacttttcttttcattcagcagtttggaaacactctgtttgtaaagtctgcacgtgcataatttgaccgcttagaggccttcgttggaaacgggtttttttcatgtaaggctagacagaagaattcccagtaactttccttgtgttgtgtgcattcaactcacagagttgaacgttcccttagacagagcagatttgaaacactctatttgtgcaatttgcaagtgtagatttcaagcgctttaaggtcaatggcagaaaaggaaatatcttcgtttcaaaactacacagaatcattcccacaaactgcgttgtgatgtgttcgttcaactcatagagtttaacctttctgttcatagagcagttaggaaacactctgtttgtaaagtctgtaagtggatattctgacctcttgtggccttcgttggaaacgggatttcttcatattctgctagacagaataattctcagtaacttccttgtgttgtgtgtattcaactcacagtagttgaaggatcctttacagcgagcaggcttgaaacactctttttgtcgaatttgcaagtggagatttcagccgctttgaggtcaatggtagaataggaaatatcttcttatagaaactagacaaaatgattctcataaactcctttgtgatgtgtgcgttcaactcacagagtttaacctttcttttcatagagcagttaggaaacactctgtttgtaaagtctgcaagtggatattcagacctctttgagaccttcgttggaaacgggatttcttcatattctgctagacagaagaattctcagtaacttccttgtgttgtgtgtattcaactgacagagttgaactttcatttagagggagcagatttgagacactgtttttgtggaatttgcaattggagatttcaagcgcttcggagccaaaggcagaaaaggaaatatcttcgtataaaaactaggcagaaccattctcagaaactgctgcgtgatgtgtgcgttcaactctcagagtttaacttttcttttcattcagcggtttggaaacactctgtttgtaaagtctgcacgtggatattttgaccacttagaggccttcgttggaatcgggtttttttcatgtaaggctagacagaagaattctcagaaacttccttgtgttgtgtgttttcaactcacagagttgaacgatgctttacacagagtagacttgaaacactctttttgtgtaatttgcaagtagagatttcagccgctttgaggtcaacggtagaaaaggaaatatcttcgtataaaaactagacagaatgattctcagaaactcctttgtgatgtgtgcattcaactcacagagtttaacctttcttttcatagaacagttaggaaacactctgtttgtaaagtctgcaagtggatattcagacctctttgaggccttcgttggaaacgggatttcttcatattatgctagacagaagaattctcagtaacttccttgtgttgtgtgtattcaactcacagagttgaacgatcctttacacagagcagacttgaaacactctttttgtggaaattgcaagtggagatttcagccgctttgaggtcaatggtagaaaaggaaatatcttcgtataaaaactagacacaatgattctcagaaactcctttgtgatgagtgcgttcaactcacagattttaacctttcttttcatagagcagttaggaaacactctgtttgtaaagtctgcacgtggatattttgacctctttgaggccttccgtggaaacgggattttttcatataaggctagacagaagaattctcagtaacttccttgtgttgtgtgtattcaactcacagagttgaactttcatttacacagagcagatttgaaacactctttttgtggaatttgcaaatggagatttcaagcgctttgaggccaaaggcagaaaaggaaatatcttcttataaaaactagacagaatcattctcagaaactgctctgcgatgtgtgcgttcaactctcagagtttaacttttcttttcattcagcagtttgtaaacactctgtttgtaaagtctgcacgttgataatttgaccacttagaggccttcgttggaaacgggtttttttcatataaggctagacagaagaattcccagtaacttccttgtgttgtgtacattcaactcacagagttgaacgttcccttagacagagcagatttgaaacactctttttgtgcaattggcaaatggagatttcaagcgctttaaggtcaatggcagaaaaggaaatatcttcgtttcaaaactagacagaatgattctcagaaagtcctttgtgatgtgtgcgttcaactcacagagttcaacctttcttttcatagagcagttgggaaacactctgtttgtaaagtctgcaagtggatattcagacttctttgaggccttcgttggaagcgggatttcttcatattctgctagacagaagaattctcagtaacttccttgtgttgtgtgtattcaactcacagagttgaacgatcctttacacagagcagacttgaaacactctttttgtggaatttgcaattggagatttcagccgctttgaggtcaatggtagaataggaaatatcttcctatagaaactagccagaatgattctcagaaactcctttgtgatgtgtgcgttcaactctcagagtttaacttttcttttcattcagcaggttggaaacactctgtttgtaaagtctgcacgtggataatttgaccacttagaggccttcgttggaaacgggtttttttcctgtaaggctagacaaaagaattcccagtaacttccttgtgttgtgtgtgttcgactcacagagttgaactttcatttacagagagcagatttgaaacactctttttgtggaatttgcaagtggagatttcaagcgctttgaggccaaaggcagaaaaggaaatatcttcgtttcaaaactagacagaatcattctcagaaactgctgcgtgatgtgtgcgttcaactctcagagtttaacttttcttttcattcagcggtttggaaacactctgtttgtaaagtctgaacgtggaaattttgaccacttagaggccttcgttggaaacgggtttttttcttgtaaggctagacagaagaattcccagtaacttccttgtgttgtgtgcattcaactcacagagttgaacgttcccttagacagagcagatttgaaacactctatttgtgcaatttgcaagtgtagatttcaagcgctttaaggtcaatggcagaaaaggaaatatcttcgtttcaaaactagacagaatgattctcagaaactcctttgtgatgtgtgcgttcaactcacagagtttaacctttcttttcatagagcagttaggaaacactctgtttgtaaagtctgcaagtggatattcagacctccttgaggccttcgttggaaacgggatttcttcatattatggtagacagaagaattctcagtaacttccttgtgttgtgtgtattcaactcacagagttgaacgatcctttacacagagcagacttgaaactctctttttgtggaatttgcaagtggagatttcagccgctttgaggtcaatggtagaataggaaatatcttcctatagaaactagacagaatgattctcagaaactcctttgtgatgtgtgtgttcaactcacagaatttaacctttcttttcatagagcagttagtaaacactctgtttataaagtctgcaagtggatattcagacccctttgaggccttcgttggaatcgggatttcttcatattatgcaagacagaagaattcccagtaacttccttgtgttgtgtgtgttcaactcacagcgttgaactttcatttacacagagcagatttgaaacactctttttgtggaatttgcaagtggagatttcaagcgctttgaggccaaaggcagaaaaggaaatatcttcgtataaaaattagacagaatcattctcagaaactgctctgcgatgtgtgcgttcaactctcagagtttaactttgcttttcattcagcagtttggaaacactctgtttgtaaagtctgcacgtggataatttgaccacttagaggccttcgttggaaacgggttttttttatgtaaggctagacagaagaattcccagtaacttccttgtgttgtgtgcattcaactaacagagttgaacgttcccttagacagagcagatttgaaacactctatttgtgcaatttgcaagtgtagatttcaagcgctttaaggtcaatggcagaaaaggaaatatcttcgtttcaaaactagacagaatcattcccacaaactgcgttgtgatgtgttcgttcaactcacagagtttaacctttctgttcatagaacagttaggaaacactctgtttgtaaagtctgcaagtggatattcagacctctttgaggccttcgttggaaacgggatttcttcatattatgctagacagaagaattctcagtaacttccttgtgttgtgtgtattcaactcacagagttgaacgatcctttacacagaccagacttgaaacactctttttgtggaatttgcaaatggagatttcagccgctttgaggtcaatggtagaaaaggaaatatcttcgtataaacactagacagaatgattctcagaaactcctttgtgatgtgtgcgttcaactcacagagtttaacctttcttttcatagagcagttaggaaacactctgtttgtaaagtctgcaagtggatattcagacatctttgaggctttcgttggaaacgggatttcttcatattctgctatacagaagaattctcagaaacttccttgtgttgtgtgttttcaactcacagagttgaacgatgctttacacagagcagacttgaaacactctttttgtggaatttgcaagtggagatttcagccgctttgaggtcaatggtagaataggaaatatcttcctatagaaactagacagaatcattctcagaaactgctctgcgatgtgtgcgttcaactctcagagtttaacttttcttttcattcagcagtttggaaacactctgtttgtaaagtctgaaggtggatattttgaccacttagaggccttcgttggaaacgggtttttttcctgtaaggctagacagaagaattcccagtaacttccttgtgttgtgtacattcaactcacagagttgaacgttcccttagacagagcagacttgtaacactctttttgtgtaatttgcaagtggagatttcagccgctttgaagtcaaaggtagaaaaggaaatatcttcctataaaaagtagacagaatcattcccacaaactgcgttgtgatgtgttcgttcaactcacagagtttaacctttctgttcatagagcagttaggaaacactctgtttgtaaagtctgcaagtggatattcagacctccttgaggccttcgttggaaacgggatttcttcatattctgctagacagaataattctcagtaacttccttgtgttgtgtgtattcaactcacagagttgaacgatcctttacacagagcagacttgaaacactctttttgtggaatttgcaagtgtagatttcaagcgctttaaggtcaatggcagaaaaggaaatatcttcgtttcaaaactagacagaatgattctcagaaactcctttgtgatgtgtgcgttgaactcacagagtttaacctttcttttcatagagcagttaggaaacactctgtttgtaaagtctgcaagtggatattcagacatcgttgaggctttccttggaaacgggatttcttcatattctgctagaaagaagaattcccagtaacttccttgtgttgtgtgtgttcaactcacagagttgaactttcatttacacagagcagatttgaaacactctttttgaggaatttgcaagtggagatgtcaagcgctttgaggccaaaggcagaaaaggaaatatcttcgtttcaaaactagacagaatcattctcagaaactgctctgcgatgtgtgcgttcaactctcagagtttaacttttcttttcattcagcagtttggaaacactctgtttgtaaagtctccacgtggatattttgaccacttagaggccttcgttggaaacgggtttttttcctgtaaggctagacagaagaattcccagtaacttccttgtgttgtgtacattcaactcacagagttgaacgttcccttagacagagcagatttgaaacactctttttgtgcaattggcaagtggagatttcaagcgctttgaggtcaatggcagaaaaggaaatatcttcgtttcaaaactagacagaataattcccacaaactgcgttgtgatgtgttcgttcaactcacagagtttaacctttgttttcatagaggagttaggaaacagtctgtttgtaaattctgtaagtggatattgtgacatcttgtggccttcgttggaaacgggatttcttcatattctgctatacagaagaattctcagtaacttccttgtgttgtgtgtattcaactcaaagagttcaacgatcctttatacagagcagacttgaaacactctttttgtggaatttgcaagtggagatctcagccgatttgtggtcaatagtagaaaaggaaatatcttcgtataaaaactagacagaatgactctcagaaactcctttgtgatgtgtgcgttcaactcacagagtttaacttttcttttcatagaccagttaggaaacactctgtttgtaatgtctgcaagtggatattcagacctctttgaggccttcgttggaaacgggatttcttcatattctgctagacagaagaattcccagtaacttccttgtgttgtgtgtgttcaactcacagagttgaactttcatttacacagagcagatttgaaacactctttttgtggaatttgcaagtggagatttcaagcgctttgaggccaaaggcggaaaaggaaatatcttcgtttcaaaactagacagaatcattcccagaaactgctctgcgatgtgtgcgttcaactctcagagtttaacttttcttttcattcagcagtttggaaacactctgtttgtaaagtctgcacgtggatattttgaccacttagaggccttcgttggaaacgggtttttttcctgtaaggctagacagaagaattcccagtaacttccttgtgttgtgtacattcaactcacagagtggaacgttcccttagacagagcagatttgaaacactctttttgtgcaattggcaagtggtgatttcagccgctttgaggtcaatggtataaaaggaaatatcttcgtataaaaactagacagaatcattcccacaaactgcgttgtgatgtgttcgttcaactcacagagtttaacctttctgttcatagagcagttaggaaacactctgtttgtaaagtctgcaagtggatattcagacctctttgaggccttcgttggaaacgggatttcttcatattatgctagacagaagaattctcagtaacttccttgtgttgtgtgtattcaactcacagagttgaacgatcctttacacagagcggacttgaaacactctttttgtggaatttgcaagtggagatttcagccgcgttgaggtcaatggtagaaaagaaaatatcttcgtataaaaactagacagaatgattctcagaaactcctttgtgatgtgtgtgttcaactcacagagtttaacctttcttttcatagagcagttaggaaacactctgtttgtaaagtctgcaagtggatattcagacctctttgaggccttcattggaaacgggtttttttcatataaggctagacagaagaattcccagtaacttccttgtgttgtgtgtgttcaactcacagagttgaactttcatttacacagagcagatttgaaacactctttttgtggaatttgcaagtggagatttcaagcgatttgagaccaaaggcagaaaaggaaatatcttcgtttcaaaactagacagaatcattctcagaaactgctgtgtgatgtgtgcgttcaactctcagagtttaacttttcttttcattcagcggtttggaaacactctgtttgtaaagtctgcacgtggatattttgaccacttagaggccttcgttggaaacgggtttttttcatgtaaggctagacagaagaattctcagtaacttccttgtgttgtgtacattcaactcacagagttgaacgatcctttacacagagcagacttgtaacactctttttgtggaatttgcaagtggagatttcagccgctttgaagtcaaaggtagaaaaggaaatatcttcctataaaaactagacagaatgattgtcagaaactcctttgtgatgtgtgcgttcaactcacagagtttaacctttcttttcatagagcagttaggaaacactctgtttgtaaagtctgcaagtggatattcagacctctttgaggccttcgttggaaacgggatttcttcatactgtgctagacagaagaattctcagtaacttccttgtgttgtgtgtattcaattcacagagttgaacgatcctttacacagagcagacttgtaacactctttttgtggaaattgcaagtggagatttcagccgctttgaagtcaaaggtagaaaaggaaatatcttcctataaaaactagacagaatgattctcagaaacttctttgtgatgtgtgcgttcaactcacagagtttaacctttcttttcatagagcagttaggaaacactctgtttgtaaactctgcaagtggatattcagacctcttcgaggccttcgttggaaacgggatttcttcatactgtgctagacagaagaattcccagtaacttccttgtgttgtgtgtgttcaagtcacagagttgaactttcatttacacagagaagatttgaaacactctttttgtggaatttgcaagtggagatttcaagcgctttgaggccaaaggcagaaaaggaaatatcttcgtttcaaaactagacagaatcattctcagaaactgctctgcgatgtgtgcgttcaactctcagagtttaacttttcttttcattcagcagtttggaaacactctgtttgtaaagtctgcacgtggatattttgaccatttagaggctttcgttggaaacgggtttttttcttgtaaggctagacagaagaattcccagtaacttccttgtgttgtgtacattcaactcacagagttgaacgtttccttagagagagcagatttgaaacactctttttgtgcaattggcaagtggtgatttcagccgctttgaggtcaatggtagaaaaggaaatatcttcgtataaaaactagacagaatgattctcagaaactcctttgtgatgtgtgcgttcaactcacagagtttaccctttcttttcatagagcagttaggaaacactctgtttgtaaagtctgcaattggatattcagacatccttgaggctttcgttggaaacgggatttcttcatattctgctagaaagaagaattctcagtaacttccttgtgttgtgtgtattcaactcacagagttgaacgatcctttacacagagcagacttgaaacactctttttgtggaatttgcaagtggagatttcagccgctttgaagtcaatggtagaataggaaatatcttcctatagaaactagacagaatgattctcagaaactcctttgtgatgtgtgtgttcaactcacagagtttaacctttcttttcatagagcagttagtaaacactctgtttataaagtctgcaagtggatattcagacccctttgaggtcttcgttggaaacgggatttcttcatattatgctagacagaagaattcccagtaacttccttgtgttgtgtgtgttcaactcacagagttgaactttcatttacacagagcagatttgaaacactctttttgtggaatttgcaagtggagatttcaagcgctttgaggccaaaggcagaaaagggaatatcttcgtataaaaactagacagaatcattctcagaaactgctctgcgatgtgtgcgttcaactctcagagtttgacttttcttttcattcagcagtttggaaacactctgtttgtaaagtctgcacgtggatattttgaccacttagaggccttcgttggaaacgggtttttttcctgtaaggctagacagaagaattcccagtaacttccttgtgttgtgtacattcaactcacagagttgaacgttcccttagacagagcagatttgaaacactctttttgtgcaattggcaaatggagatttcaagcgctttaaggtcaatggcagaaaaggaaatatcttcgtttcaaaactagacagaatcattcccacaaactgcgttgtgatgtgttcgttcaactcacagagtttaacctttcttttcatagagcagttaggaaacagtctgtttgtcaattctgtaagtggatattctgacatcttgtggccttcgttggaaacgggatttcctcatactctgctagacagaagaattctcagtaacttccttgtgttgtgtgtattcgactcacagagttgaacgatcctttacacagagcatacttgaaacactctttttgtggaatttgcaagtggagatttcagccgctttgaggtcaatggtagaataggaaatatcttcctatagaaactagacagaatgattctcagaaactcctttgtgatgtgtgcgttcaactcacagagtttaacctttcttttcatagagcagttaggaaacactctgtttgtaaagtctgcaagtggatattcagacatctttgaggctttctttgaaatgggatttcttcatattctgctagacagaagaattcccagtaacttccttgtgttgtgtgtgttcaactcacagagttgaactttcatttacacagagcagatttgaaacactctttttgtggaatttgcaagtggagatttcaagcgctgtgaggccaaaggcagaaaaggaaatatcctcgtataaaaactagacagaatcattctcagaaactgctgcatgatgtgtgcgttcaactctcagagtttaacttttcttttcattcagcggtttggaaacactctgtttgtaaagtctgcacgtggatattttgaccacttagaggccttcgttggaaacgggttttttcatgtaaggctagacagaagaattcccagtaacttcccttgtgttgtgtgcattcaactcacagagttgaacgttcccttagacagagcagatttgaaacactctatttgtgcaatttgcaagtgtagttttcaagctctttaaggtcaacggcagaaaaggaaatatcttcgtttcaaaactagacagaatcattcccacaaactgcgttgtgatgtgttcgttcaactcacagagtttaacgtttcttttcatagagcatttaggaaacagtctgtttgtcaattctgtaagtggatattctgacatcttgtggccttcgttggaaacgggatttcttcatattctgctagacagaagaattctcagtaacttccttgtgttgtgtttattcaacacacagagttgaatgatcctttacacagagcagacttgaaacactctttttgtggaatttgcaagtggagatttcagccgctttgtggtcaatggtagaaaaggaaactatcttcatataaagactagacagaatgattctcagaaactcctttgtgatgtgtgcgttcaactcacggagtttaacctttcttttcatagagcagttaggaaacactctgtaaagtctgcaagtagatattcagacctctctgaggccttcgttggaaacgggatttcttcatattatgctagacagaagaattctcagtaacttccttgtgttgtgtgcattcaactcacagagttgaaagatcctttacacagagcagattagaaacaatatttttgtggattttgcaagcggagatttcagccactttgaggtcaatggtagaaaaggaaatatcttcataaaaaaactagacagaatcattctcagaaactgctgcgtgatgtgtgcgttcaactctcagagtttaacttttcttttcattcagcggtttggaaacactctgtttgtaaagtctgcacgtggaaattttgaccacttagaggccttcgttggaaacgggtttttttcatgtaaggctcgacagaagaattcccagtaacttccttgtgttgtgtacattcaactcacagagttgaacgttcccttacacagagcagatttgaaacactctttttgtgcaattggcaagtggagatttcaagcgctttaaggtcaatggcagaaaaggaaatatcttcgtttcaaaactagacagaatcattcccacaaactgcgttgtgatgtgtgcgttcaactcacagagtttaacttttcttttcatagagcagttaggaaacactctgtttgtaaagtctgcaagtggatattcagacctctttgaggccttcgttggaaacgggatttcttcatattctgctagacagaagaattctcagtaacttccttgtgttgtgtgtattcaactcacagagttgaacgatcctttacacagagcagacttggaacactgttcttgtggaatttgcaagtggagatttcagccgcgttgaggtcaatggtagaaaaggaaatatcttcgtataaaaactagacagaatgattctcagaaactcctttgtgatgtgtgcgttcaactcacagagtttaaccattcttttcatagagcagttaggaaacactctgtttgtaaagtctgcaagtggatattcagacctccttgaggccttcgttggaaacgggatttctttatattctgctagacagaaggattcccagtaacttccttgtgttgtgtgtgttcaactcacagagttgaactttcatttacaaagagcagatttgaaacactctttttgtggaatttgcaagtggagatttcaagcgctttgaggccaaaggcagaaaagtaaatatcttcgtataaaaactagacagaatcattctcagaaactgctctgcgatgtgtgcgttcaactctcagagtttaacttttcttttcattcagcagtttggaaacactctgtttgtaaagtctgcacgtggataatttggccacttagaggccttcgttggaaacgtgtttttttcatgtaaggctagacagaagaattcccagtaacttccttgtgttgtgtgcattcaactcacagagttgaacgttcccttagacagagcagatttgaaacagcctatttgtgcaatttgcaagtgtagatttcaagcgctttaaggtcaacggctgaaaaggaaatatcttcgtttcaaaactatacagaatgattctcagaaactcctttgtgatgtgtgcgttcaactcacagagtttaaccttacttttcatagagcagttaggaaacactctgtttgtaaagtctgcaagtggatattcagacctccttgaggccttcattggaaacgggatttcttcatgttctgctagacagaataattctcagtaacttccttgtgttgtgtgtattcaactcacagagttgcacgatcctttacacagagcagacttgaaacactctttttgtggaatttgcaagtggagatttcagccgctttgaggtcaatagtagaaaaggaaatatcttcgtagaaaaactacacagaatgattctcagaaactcctttgtgatgtgtgtgttcaactcactgagtttaacctttcttttcatagaacagttagtaaacactctgtttataaagtctgcaaatggatattcagacccatttgaggccttcgttggaaacgggatttcttcatattatgctagacagaagaattcccagtaacttccttgtgttgtgtgtgttcaactcacatagttgaactttcatttacacagagcagatttgaaacactctttttgtggaatttgcaaatggagatttcaagcgctttgaggccaaaggcagaaaagcaaatatcttcgtataaaaactagacagaatcattctcagaaactgctctgcgatgtgtgcgttcaactctcagagtttaacttttcttttcattcagcagtttggaaacactctgtttgtaaagtctgcacgtggatattttgaccacttagaggccttcgttggaaatgggtttttttcctgtaaggctagacagaagaattcgcagtaacttccttgtgttgtgtacattcaactcacagagttgaacgttcccttagacagagcagatttgaaacactctttttgtgcaattggcaagtggagatttcaagcgctttaaggtcaatggcagaaaaggaaatatcttcgtttcaaaactagacagaatcattcccacaaactgcgttgtgatgtgttcgttcaactcacagagtttaacctttctgttcatagagcagttaggaaacactctgtttgtaaagtctgtaagtggatattctgacatcttgtggccttcgttggaaacgggatttattcatattctgctagacagaagaattctcagtaacttccttgtgttgtgtgtattcaactcacagagttgaatgatcctttacacagaacagacttgaaacactctttttgtggaatttgcaagtggagatttcagccgctttgtggtcaatggtagaataggaaatatcttcctatagaaactagacagaatgattctcagaaaatcttttgtgatgtgtgcgttcaactcacagagtttaacttttcttctcatagagcagttaggaaacactctgtttgtaaagtctgcaagtggatattcagacctccttgaggccttcgttggaaacgggatttcttcatattctgccagacagaaggattcccagtaacttccttgtgttgtgtgtgttcaactcacagagttgaactttcatttacaaagagcagatttgaaacactctttttgtggaatttgcaagtggagatttcaagcgctttgaggccaaaggcagaaaaggaaatatcttcgtataaaaactagacagaatcattctcagaaactgctctgcgatgtgtgcgttcaactctcagagtttaacttttcttttcattcagcagtttggaaacaatctgtttgtaacgtctgcacgtgaataatttgaccacttagaggccttcgttggaaacgggtttttttcatgtaaggctagacagaagaattcccagtaacttccttgttttgtgtacattcaactcacagagttgaacgttcccttagatagagcagatttgaaacactctttttgtgcaattggctagtggtgatttcagccgctttgaggtcaatggtagaaaaggaaatatcttcgtataaaaactagacagaatgattctcagaaacttcattgtgatgtgtgcgttcaactcacagagtttaacctttcttttcatacagcagttaggaaacactctgtttgtaaactctgcaagtggatattcagacctctttgaggccttcgttggaaacgggaattcttcatactgtgctagacagaagaattctcagtaacttccttgtgttgtgtgtattcaactcacagagttgaaggatcctttacagagagcaggcttgaaacactctttttgtcgaatttgcaagtggagatttcagccgctttgaggtcaatggtagaataggaaatatcttcttatagaaactagacaaaatgattctcagaaacttctttgtgatgtgtgcgttcaactcacagagtttaacctttcttttcatagagcagttaggaaaccctctgtttgtaaactctgcaagtggatattcagaccactttgaggccttcgttggaaacgggatttcttcatactatgctagacagaagaattcccagtaacttccttgtgttgtgtgtgttcaactcacagagttgaactttcatttacacagagcagatttgaaacactctttttgtggaatttgcaaatggagatttcaagcgctttggggccaaaggcagaaaaggaaatatcttcgtataaaaactagacagaatcattctcagaaactgctctgcgatgtgtgcgttcaactctcagagtttaacttttcgtctcattcagcagtttggaaacactctgtttgtaaagtctgcacgtggataatttgaccacttagaggccttcgttggaaacgggtttttttcatgtaaggctagacagaagaattcccagtaacttccttgtgttgtgtacattcaactcacagagttgaacgttcccttagacagagcagatttgaaacactctttttgtgcaattggcaagtggagatttcaagcgcttgaggtcaatggcagaaaaggaaatatcttcgtttcaaaactagacagaatcattcccacaaactgcgttgtgatgggttcgttcaactcacagagtttaacctttcttttcatagagcagttaggaaacagtctgtttgtcaattctgtaagtggatattctgacatcttgtggccttcgttggaaacgggatttctttatattctgctagacagaataattctcagtaacttccttgtgttgtgtgtattcaactcacagagttgaacgatcctttacagagtgcaaacttgaaacactctttttgtggaatttgcaagtggagatttcagccgctttgaggtcaatgatagaataggaaatatcttcctatagaaactagacagaatgattctcagaaactcctttgtgatgtgtgtgttcaactcacagagtttaacctttcttttcattcagcagttaggaaacactctgtttgtaaagtctgcaagtggatattcagacctctttgaggccttcgttggaaacgggtttttttcatataaggctagacagaagaattcccagtaacttccttgtgttgtgtgtgttcaactcacagagttgaactttcatttacacagagcagatttgaaacactctttttgtggaatttgcaagtggagatttcaagcgctttgtggccaaaggcagaaaaggaaatatcttcgtataaaaactagacagaatcattctcagaaactgctgcgtgatgtgtgcgttcaactctcagagtttaacttttcttttcattcagaggtttggaaacactctgtttgtaaagtctgcacgtggatattttgaccacttagaggccttcgttggaaacgggttttttgcatgtaaggctagacagaagaattcccagtaacttccttgtgttgtgtgcattcaactcacagagttgaacgttcccttagacagagcagatttgaaacactctatttgtgcaatttgcaagtgtagatttcaagcgctttaaggtcaatggcagaaaaggaaatatcttcgtttcaaaactagacagaatcattcccacaaactgcgttgtgatgtgttcgttcaactcacagagtttaacctttctgttcatagagcagttaggaaacactgtgtaaagtctgtaagtggatattctgacatcttgtggccttcgttggaaacgggatttcttcatattctgctagacagaagaattctcagtaactgccttgtgttgtgtgtattcaactcacagagttgaacgatcctttacacagagcagacttgaaacactctttttgtggaacttgcaagtggagatttcagccgctttgaggtcaatggtagaataggaaatatcttcctatagaaactagacagaatgattctcagaaacttctttgtgatgtgtgcgttgaactcacagagtttaacctttcttttcatagagcagttaggaaacactctgtttgtaaactctgcaagtggatattcagacctctttgaggccttcgttggaaacgggatttcttcatactgtgctagacagaagaattttcagtaacttccttgtgttgtgtgtattcaactcacagagttgaacgatcctttacacagagcagacttgaaacactctttttgtggaaattgcaagtggagatttcagccgctttgaggtcaatggtagaaaaggaaatatcttcgtataaaaactagacacaatgattctcagaaactcctttgtgatgtgtgcgttcaactcacagagtttaacctttcttttcatagagcagttaggaaacactctgcttgtaaagtctgcatgtggatattcagacctctttgaggccttcgttggaaacgggtttttttcatataaggctagacagaagaattcccagtaacttccttgtgttgtgtacattcaactcacagagttgaacgttcccttagacagagcagatttgaaacactctttttgtgcaattggcaaatggagatttcaagcgctttaaggtcaatggcagaaaaggaaatatcttcgtttcaaaactagacagaatcattctcagaaactgctgcgtgatgtgtgcgttcaacactcatagtctaacttttcttttcattcagcggtttggaaacactctgtttgtaaagtctgaacgtgcatattttgaccacttagaggccttcgttggaaacgggtttttttcatgtaaggctagacagaagaattcccagtaacttccttgtgttgtgtccattcaactcacagagttgaacgttcccttagacagagcagatttgaaacactctatttgtgcaatttgcaagtgtagatttcaagcactttaaggtcaacggcagaaaaggaaatatcttcgtttcaaaactagacagaatcattcccacaaactgcgttgtgatgtgttcgttcaactcacagagtttaacctttctgttcatagagcagttaggaaacactctgtttgtaaagtctgcaagtggatattcagacctccttgaggccttcgttggaaacgggatttcttcatattctgctagacagaagaattcccactaacatccttgtgttgtgtgtgttcaactcacagagttgaactttcatttacacagagcagatttgaaacactctttttgtggaatttgcaaatggagatttcaagcgctttgaggccaaaggcagaaaaggaaatatcttcgtttcaaaactagacagaatgattctcagaaactcctttgtgatgtgtgcgtgcaactcacagagtttaacttttcttttcatagagcagttaggagacactctgtttgtaaagtctggaagtggatattcagacctccttgaggccttcgttggaaacgggatttcttcatattctgctagacagaagaattctcagtaacttcctcgtgttgtgtgtattcaacctcacagagttgaacgatcctttacacagagcagacttgaaacacactttttgtggaatttgcaagtggagatttcagccgctttgaggtcaatggtagaaaaggaaatatcttcgtataaagactagacagaatcattcccacaaactgcgttgtgatgtgtgcgttcaagtcaaagagtttaacctttcttttcatagagcagttaggaaacactctgtttgtaaagtctgcaagtggatattcagacctccttgaggccttcgttggaaacgggatttcttcatattctgctagacagaagaattctcagaaacttccttgtgttgtgtgtattcaactcacagagttgaacgatcgtttacacagagtagacttgagacactctttctgtggaatttgcaagtggagatttcagccgctttgaggtcaatggtagaaaagtaaatatcttcgtataaagactagacagaacgattctcagaaactcctttgtgatttgtgcgtacaactcacagagtttaacctttcttttcatagagcagttaggaaacactctctttgtaaagtctgcaagtggatattcagacctctttgaggccttcgttggaaacgggatttcttcatattctgctagacagaagaattctcagtaacttccttgtgttgtgtttattcaactgacagagttgaactttcatttagagagagcagatttgaaacactgtttttgtggaatttgcaagtggagatttcaagctttggggccaaaggcagaaaaggaaatatcttcgtataaaaactagacagaatcattctcagaaactgctgcgtgatgtgtgcgttcaactctcagagtttaacttttcttttcattcagcggtttggaaacactctgtttgtatagtctgcacgtggatattttgaccacttagaggccttcgttggaaacgggtttttttcatgtaaggctagacagaagaattcccagtaacttccttgtgttgtgtgcattcaacccacagagttgaacgttcccctagacagagcagatttgaaacactctatttgtgcaatttgcaagtgtagttttcaagctcttttaggtcaacggcagaaaaggaaatatcttggtttcaaaactagacagaatcattcccacaaactgcgttgtgatgtcttcgttcaacacacagagtttaacctttcttttcatagagcagttaggaaacagtctgtttgtaaattctgtaagtggatattctgacatcttgtggccttcgttggaaacgggatttcttcatattctgctagacagaagaattctcagaatcttccttgtgttgtgtgtattcaactcacagaggtgaacggtcctttacacagagcagacttgaaacactctttttgtggaatttgcaagtggagatttcagccgctttgaggtccatggtagaaaaggaaatatcttcgtataaaaactagacagaatgattctcagaacctcctttgtgatgtgtgcgttcaactcacagagtttaacctttcttttcatagagcagttaggaaacactctgtttgtaaagtctgcaagtggatattcagacatccttgaggctttcgttggaaacgggatttcttcatattctgctagaaagaagaattctcagtaacttccttgtgttgtgtgtattcaactgacagagttgaactttcatttagagagagcagatttgaaacactgtttttgtggaatttgcaagtggagatatcaagcgccttggggccaaaggcagaaaaggaaatatcttcgtttaaaaagtagacagaatgattctcagaaactcctttgtgatgtgtgcgttcaactcacagagtttaacttttcttttcatagagcagttaggaaacactctgtttgtaaagtctgcaagtggatattcagacctctttgaggccttcgttggaaacgggatttcttcatattttgctagacagaagaattcccagtaacttccttgtgttgtgtgcactcaactcacagagttgaacgttcccttagacagagcagatttgaaacactctatttgtgcaatttgcaagtggagatttcaagcgctttatggtcaatggaagaaaaggaaatatcttcgtttcaaaactagacagaatgattctcagaaacttctttgtgatgtgtgcgttcaactcacagagtttaacctttcttttcatagagcagttaggaaacactctgtttgtaaactctgcaagtggatattcagacctctttgaggccattgttggaaacgggatttcttcatactatgctagacagaagaattctcagaatcttccttgtgttgtgtgtattcaactcacacagttgaacgactgtttacacagagcagatgtgaaacactctttttgtggaatttgcaagtggagatttcagccgctttgaggtcaatggtagaaaaggaaatatcttcgtataaaaactagacagaatgattctcagaaacttctttgtgatgtgtgcgttcaactcacagagtttaacctttcttttcatagagcagttaggaaacactctgtttgtaaactctgcaagtggatattcagacctctttgaggccttcgttggaaacgggatttcttcatactgtgctagacagaagaattctcagtaacttccttgtgttgtgtgtattcaactcacagagttgaacgatcctttacacagagcggacttgaaacactctttttgtggaatttgcaagtggagatttcaggcgcgttgaggtcaatggtagaaaaggaaatatcttcgtataaaaactagacagaatcattctcagaaaatgctctgtgatgtgtgcgttcaactctcagagtttaacttttcttttcattcagcactttggaaacactctgtttctaaagtctgcacgtggatattttgaccacttagaggtctttgttggaaacgggtttttttcacgtaaggctagacagaagaattcccagtaacttccttgtgttgtgtacattcaactcacagagttgaacgttcccttagacagagcagatttgaaacactctttttgtgcaattggcaaatggagatttcaagcgctttaaggtcaatggcagaaaaggaaatatcttcgtttcaaaactagacagaatgattctcagaaaattctttgtgatgtgtgcatcaaatcacagagtttaacctttcttttcatagagcagttaggaaacactctgtttgtaaactctgcaagtggatattcagacctctttgaggccttcgttggaaacgggatttcttcatactgtgctagacagaagaattctcagtaacttccttgtgttgtgtgtattcaactcacagagttgaacgatcctttacacagagcagacttgaaacgctctttttgtggaatttgcaagtggagatttcagccgcgttgaggtcaatggtagaaaaggaaatatcttcgtataaaaactagacagaatgattctcagaaactcctttgtgatgtgtgctgttcaactcacagagtttaacctttcttttcatagagcagttaggaaacactctgtttgtaaagtctgcaagtggatattcagacctctttgaggccttcgttggaaacgggtttttttcatataaggctagacagaagaattctcagtaacttccttgtgttgtgtgtattcaactgacagagttgaactttcatttagagagagcagatttgaaacactgtttttgtggaatttgcaaatggagatttcaagcgctttggggccaaaggcagaaaaggaaatatcttcgtataaaaactagacagaatcattctcagaaactgctgcgtgatgtgtgcgttcaactctcagagtttaacttttcttttcattcagcggtttggaaacactctgtttgtaaagtctgcacgtggaaattttgaccacttagaggccttcgttggaaacgggtttttttcatgtaaggctagacagaagaattcccagtaacttccttgtgttgtgtgcattcaactcacagagttgaacgttcccttagacagagcagatttgaaacactctatttgtgcaatttgaaagtgtagatttcaagcgctttaaggtcaacggcagaaaaggaaatatcttcgtttcaaaactagacagaatgattctcataaactcctttgtgatgggtgcgttcaactcacagagtttaacctttcttttcatagagcagttaggaaacactctgtttgaaaagtctgcaagtggatattcagacctccttgaggccttcgttggaaacgggatttcttcatattctgctagacagaagaattctcagtaacttccttgtgttgtgtttattcaactcacagagttgaatgatcctttacacagagcagacttgaaacactctttttgtggaatttgcaagtggagatttcagccgctttgaggtcaatggtagaataggaaatatcttcgtataaagactagacagaatgattctcagaaactcctttgtgatgtgtgcgttcaactcacagagtttaacctttcttttcatagagcagttaggaaacactctgtttgtaaagtctgcaagtggatattcagacctccttgaggccttcgttggaaacaggatttcttcatattctgctagacagaagaattctcagtaacttctttgtgttgtgtgtattcaactcacagagttgaacgatcctttacacagagcagacttgaaacactctttttgtggaatttgcaagtggagattacagccgctttgacgtcaatggtagaaaaggaaatatattcgtataaagactagacagaatcattctcagaaactactctgtgatgtgtgcgttcaactctccgagtttaacttttcttttcattcagtagtttggaaacactctgtttgtaaatctgcacgtggatattttgacgacttagaggctttcgttggaaacgggtttttttcatgtaaggctagacagaagaattcccagtaacttccttgtgttgtgtgcattcaactcacagagttgaacgttcccttagacagaacagatttgaaacactctatttgtgcaatttgcaagtgtagatttcaagcgctttaaggtcaatggcagaaaaggaaatatcttcgtttcaaaactagacagaatcattcccacaaactgcgttgtgatgtgctcgttcaactcacagagtttaacctttctgttcatagagcagttaggaaacactctgtttgtaaagtctgcaagtggatattcagacctccttgaggccttcgttggaaacgggatttcttcatattctgctagacagaataattctcagtaacttccttgtgttgtgtgtattcaactcacagagttgtacgatcctttacacagagcagacttgaaacactctttttgtggaatttgcaagtggagatttcagccgctttgaggtcaatggtagaaaaggaaatatcttcgtataaagactagacagaatgattctcagaaactcctttgtgatgtgtgcgttcaactcacagagttcaacctttcttttcatagagcagttaggaaacactctgtttgtaaagtctgcaagtggatattcagacctccttgaggccttcgttggaaacgggatttcttcatattatgctagacagaagaattctcagtaacttccttgtgttgcgtgtattcaactcacagagttgaacgatcctttacacagagcagacttgaaacactctttttgtggaatttgcaagtggagatttcagccgctttgaggtcaatggtagaataggaaatatcttcctatagaaactagacagaatcattctcagaaactgctgcgtgatgtgtgcgttcaactctcagagtttaacttttcttttcattcagcggtttggaaacactctgtttgtaaagtctgcacgtggaaattttgaccacttagaggccttcgttggaaacgggtttttttcatttaaggctagacagaagaattcccagtaacttccttgtgttgtgtgcattcaactcacagagttgaacgttcccttagacagagcagatttgaaacactctatttgtgcaatttgcaagtgtagatttcaagcgctttaaggtcaacggcagaaaaggaaatatcttcgtttcaaaactagacagaatcattcccacaaactgcgttgtgatgtgttcgttcaactcagagtttaacctttctgttcatagagcagttaggaaacactctgtttgtaaagtctgtaagtggatattctgacatcttgtggccttcgttggaaacgggatttcttcatattctgctagacagaagaattctcagtaacttccttgtgttgtgtgtattcaactcacagagttgaacgatcctttacacagagcagacttgtaacactctttttgtggaatttgcaagtggagatttcagccgctttgaagtccaaggtagaaaaggaaatatcttcctataaaaactagacagaatgattctcagaaactcctttctgatgtgtgcgttcaactcgcagagtttaacttttcttttcatagagcagttaggaaacactctgtttgtaaagtctgcaagtggatattcggacctctttgaggccttcgttggaaacgggaattcttcatattatgctagacagaagaattcccagtaacttccttgtgttctgtgtgttcaactcacagagttgaactttcatttacacagagcagatttgaaacactctttttgtggaatttgcaagtggagatttcaagcgctttgaggccaaaggcagaaaaggaaatatcttcgtttcaaaactagacagaatcattctcagaaactgctgcgtgatgtgtgcgttcaactctcagagtttaacttttcttttcattcagcggtttggaaacactctgtttgtaaagtctgcacgtggaaattttgaccacttagaggccttcgttggaaacgggtttttttcatgtaaggctagacagaagaattcccagtaacttccttgtgttgtgtgcattcaactcacagagttgaacgttccattagacagagcagatttgaaacactctatttgtgcaatttgcaagtgtagatttcaagcgctttaaggtcaatggcagaaaaggaaatatcttcgtttcaaaactagacagaatgattctgagaaactcctttgtgatgtgtgcgttcaactcacagagtttaacttttcttttcatagagcagttaggaaacactctgtttgtaaagtctgcaagtggatattcagacctccttgaggccttggttggaaacgggatttcttcatattatgctagacagaataattctcagtaacttccttgtgttgtgtgtattcaactcacagagttgaacgatcctttacagagagcagagttgaaacactctttttgtggaatttgcaagtggagatttcagccgctttgaggtcaatggtagaaaaggaaatatctttgtataaagactagacagaatgattctcagaaactcctttgtgatgtgtgcgttcaactcacagagtttaacttttcttttcatagagcagttaggaaacactctgtttgtaaagtctgcaagaggatattcagacctctttaaggccttcgttggaaaagggatttcttcatattctgctagacagaagaattctcagtaacttccttgtgttgtgtgtattcaactgacagagttgaactttcatttagagagagcagatttgaaacactgtttttgtggaatttgcaagtggagatttcaagcactttggggccaaaggcagaaaacgaaatatcttcgtataaaaagtagacagaatcattctcagaaactgctgcgtgatgtgtgcgttcaactctcagactttaacttttcttttcattcagcggtttggaaacactctgtttgtaaagtctgcacgtggatattttgaccacttagaggccttcgttggaaacgggtttttttcatgtaaggctagacagaagaattcccagtaacttccttgtgttgtgtacattcaactcacagagttgaacgttcccttagacagagcagatttgaaacactctttttgtgcaattggcaaatggagatttcaagcgctttaagttcaatggcagaaaaggaaatatcttcgtttcaaaactagacagaatcattcccacaaactgcgttgtgatgtgttcgttcaactcacagagtttaacctttccgttcatagagcagttaggaaacactctctaaagtctgtaagtggatattcagatctccttgaggtcttcgttggaaacgggatttcttcatattctgctagacagaagaattctcagtaactttccttgtgttgtgtgtattcaactcacagagttgaacgatcctttacacagagcagacttgtaacactctttttgtggaatttgcaagtggagatttcagccactttgaagtcaaaggtagaaaaggaaataacttcctataaaaactagacagaatgattctcagaaactcctttgtgatgtgtgcgttcaactcacagagtttaacctttcttttcatagagcagttaggaaacactctgtttgtaaagtctgcaagtggatattctgacctctttgaggccttcgttggaaacgggtttttttcatataaggctagacagaagtaatctcagtaacttccttgtgttgtgtgtattcaactgacagagttgaaatttcatttagagggagcagatttgaaacactgtttttgtggaatttgcaagtggagatttcaaacgctttggggccaaaggcagaaaaggaaacatcttcgtataaaaactagacagaatcattctcagaaactgctgcgtgatgtgtgcgttcaactctcagagtttaacttttcttttcattcagcggtttggaaacactctgtttgtaaagtctgcacgtggaaattttgaccacttagaggccttcgttggaaacgggattttttcatgtaaggctagacagaagaattcccagtaacttccttgtgttgtgtgcattcaactcacagagttgaacgttcccttagacagagcagatttgaaacactctatttgtgcaatttgcaagtgtagttttcaagctctttaaggtcaacggcagaaaaggaaatatcttcgtttcaaaactagaccgaatcattcccacaaactgcgttgtgatgtgttcgttcaactcacagagtttaacctttctgttcatagagcagttaggaaatactctgtttgtaaagtctgcaagtggatattcagacctccttgaggccttcgttggaaacgggatttcttcatattctgctagacagaataattctcagtaactttccttgtgttgtgtgtattcaactcacagagttgaacgatcctttacacagagcagacttgaaacactctatttgtagaatttgcaagtggagatttcagccgctttgaggtcaatagtagaaaaggaaatatcttcgtagaaaaactagacagaatgattctcagaaactcctttgtgatgtgtgcgttcaactcacagagtttaacctttcttttcatagagcagttaggaaacactgtgtttgtaaagtctgcaagtggatattcagacctccttgaggccttcgttggaaacgggatttcttcatattatgctagacagaagaattctcagtaacttccttgtgttgtgtgtattcaactcacagagttgaacgatcctttacacagagcatacttgaaacactcttcttgtggaatttgcaagtggagatttcagccactttgaggtcaatggtagaataggaaatatcttcctatagaaactagacagaatgattctcagaaactcctttgtgatgtgtgtgttcaactcacagagtttaacctttcttttcatacagcatttagtaaacactctgtttataacgtctgcaagtggatattcagacccctttgaggccttcgttggaaacgggatttcttcatattatgctagacagaagaattcccagtaacttccttgtgttgtgtgcattcaactcacagagttgaacgttcccttagacagagcagatttgaaacactctatttgtgcaatttgcaagtgtagatttcaagcgctttaaggtcaacggcagaaaaggaaatatcttcgtttcaaaactagacagaatcattaccacaaactgcgttgtgatgtgttcgttcaacccacagagtttaagctttctcttcatagagcagttaggaaacactctgtttgtgaagtctgtaagtggatattctgacatcttgtggccttcgttggaaacgggatttcttcatattctgctagacagaagaattctcagaatcttccttgtgttgtgtgtattcaactcacagagttgaacgatcctttacacagagcagacttgaaacactctttttgtggaatttgtaagtggagatttcagccgctttgaggtccatggtagaaaaggaaatatcttcgtataaaaactagacagaatgattctcagaaactcctttgtgatgtgtgcattcaactcacagagttcaacctttcttttcatagagcagttgggaaacactctgtttgtaaagtctgcaagtggatattcagacttctttgaggccttcgttggaagcgggatttcttcatgttctgctagacagaagaattcccagtaacttcccttgtgttggctgtgttcaactcacagagttgaactttcatttacacagagcagatttgaaacactctttttgtggaatttgcaaatggagatttcaagcgctttgaggccaaaggcagaaaaggaaatatcttcgtataaaaactcgacagaatcattctcagaaactgctctgcgatgtgtgcgttcaactctcagagtttaacttttcttttcattcagcagtttggaaacactctgtttgtaaagtctgcacgtggataacttgaccacttagaggccttcgttggaaacgggtttttttcatgtaaggctagacagaagaattcccagtaacttccttgtgttgtgtgcattaaactcacatagttgaacgtttccttagacagagctgaattgaaacacgctatttgtgcaatttgcaagtgtagatttcaagcgctttaaggtcaatggcagaaaaggaaatatcttcgtttcaaaactagacagaatcattcccaaaaactgcgttatgatgtgttcgttcatctcacagagtttaacctttcttttcatagagcagttaggaaacagtctgtttgtaaattctgtaagtggatattctgacatcttgtggccttcgttggaaacgggatttcttcatattctgctagacagaagaattctcagtaacttccttgtgttgtgtgtattcaactcacagagttgaacgatcatttacacagagcagacttgaaacactctttttgtggaatttgcaagtggagatttcagccgctttgaggtcaatggtagaaaaggaaatatcttcgtataaagactagacagaacgattctcagaaactcctttgtgatgtgtgcgttcaactcacagagtttaacctttcttttcatagagcagttaggaaacactttgtttgtaaagtctgcaagtggatattcagacctctttgaggccttcgttggaaacgggatttcttcctattctgctagacagaagaattctcagtaacttccttgtgttgtgtgtattcaactcacagagttgaacgatcctttacacagagcagagttgaaacactctttttgtggaatttgcaagtggagatttcagccgctttgaggtcaatagtagaaaaggaaatatcttcgtagaaaaactagacagaatcattctcagaaagtgctctgcgatgtgtgcgttcaactctcagagtttaactttgcttttcattcagcagtttggaaacactctgtttgtaaagtctgcacgtggataatttgaccacttagaggccttcgttggaaacgggtttttttcatgtaaggctagacagaagaattcccagtaacttccttgtgttgtgtacattcaactcacagagttgaacgttcccttagacagagcagatttgaaacactctttttgtgcaattggcaagtggagatttcaagcgctttgaggtcaatggcagaaaaggaaatatcttcgtttcaaaactagacagaatcattcccacaaactgcgttgtgatgtgttcgttcaactcacagagtttaacctttcttttcatagagcagttaggaaacagtctgtttgaaaattctgtaagtggatattctgacatcttgtggccttcgttggaaacgggatttcttcatattactgctagacagaagaattctcagtaacttccgcgtgttgtgtgtattcaactcacagagttgaacgatcctttacacagagcagacttgaaacactctttttgtggaatttgcaagtggagatttcagccgctttgaggtcaatggtagaaaaggaaataccttcctataaaaactagacagaatgattctcagaaactcctttgtgatgtgtgcgttcaactcacagagtttaacctttcttttcatagagcagttaggaaacactctgtttgtaaagtctgcaagtggatattcagacctctttgaggccttcgttgaaaacgggatttcttcatattctgctagggagaagaattctcagtaacttccttgtgttgtgtgtattcaactgacagagttgaactttcatgtagagagagcagatttgaaacactgtttttgtggaatttgcaagtggagatttcaagcgctttggggccaagggcagaaaaggaaatatcttcgtataaaaactagacagaatcattctcagaaactgctctgcgatgtgtgcgttcaactctcagagtttaacttttcttttcattcagcagtttggaagcactctgtttgtaaagtctgcacgtggataatttgaccacttagaggccttcgttggaaacgggtttttttcatataaggctagacagaagaattcccagtaacttccttgtgttgtgtgcattcaactcacagagttgaacgttcccttagacagagcagatttgaaacactctatttgtgcaatttgcaagtgtagatttcaagcgctttaaggtcaatggcagaaaaggaaatatcgtcgtttcaaaactagacagaatgattctcagaatctcctttgtgatgtgtgcgttcaactcacagagttcaacctttcttttcatagagcagttgggaaacactctgtttgtaaagtctgcaagtggatattcagacttctttgaggccttcgttggaagcgggatttcttcatgttctgctagacagaagaattctcagtaacttctttgtgttgcgtgtattcaactcacagagttgaacgatcctttacacagaggagacttgaaacactctttttgtggaatttgcaagtggagattacagccgctttgaggtcaatggtagaaaaggaaatatcttcgtataaagactagacagaatgattctcagaaactcctttgtgatgtgtgcgttcaactcacagagcttaacctttcttttcatagagcagttaggaaacactctgtttgtaaagtctgcaagtggatattcagacacctttgaggccttcgttggaaacgggatttcttcatgttctgctagacacaagaattcccagtaacttccttgtgttgtgtgtgttcaactcacagagttgaactttgatttacacagagcagatttgaaacactctttttgtggaatttgcaagaggagatttcaagcgctttgaggccaaaggcagaaaaggaaatatcttcgtataaaaactagacagaatcattctcagaaactgctctgcgatgtgtgcgttcaactctcagagtttaacttctcttttcattcagcagtttggaaacactctgtttgtaaagtctgcacgtggataacttgaccacttagaggccttcgttggaaacgggtttttttcatgtaaggctagacagaagaattcccagtaacttccttgtgttgtgtacattcaactcacagagttgaacgatcccttagtcagagcagatttgaaacactctttttgtgcaattggcaagtggagacttcaagcgctttaaggtcaatggcagaaaaggaaatatcttcgtttcaaaactagacagaatcattcccacaaactgcgttgtgatgtgttcgttcatctcacagagtttaacctttcttttcatagagcagttaggaaacagtctgtttgtaaattctgtaagtggatattctgacatcttgtggccttcgttggaaacgggatttcttcatattctgctagacagaaataattctcagtaacttccttgtgttgtgtgtattcaactcacagagttgaacgatcctttacagagagcagacttgaaacactctttttgtggaatttgcaagtggagatttcagccgctttgaggtcaatggtagaataggaaatatcttccaatagaaactagacagaatgattctcagaaactcctttgtgatgtgtgtgttcaactcacagagtttcacctttcttttcatagagcagttaggaaacactctgtttgtaaagtctgcaagtggatattcagacctccttgaggccttcgttggaaacgggatttcttcatattctgctagacagaagaattcccagtaacttccttgtgttgtgtgtgttcaactcacagagttgaactttcatttacccagagcagatttgaaacactctttttgtggaatttgcaagtggagatttcaagcgctttgagaccaaaggcagaaaaggaaatatcttcgtttcaaaactagacagaatcattctcataaactgctctgcgatgtgtgcgttcaactctcagagtttaacttttcttctcattcagcagtttggaaacactctgtttgtaaagtctgcacgtggataatttgaccacttagaggccttcgttggaaacgggtttttttcatgtaaggctagacagaagaattcccagtaacttccttgtgttgtgtacattcaactcacagagttgaacgttcccttagacagagtagatttgaaacactctttttgtgcaactggcaaatggagatttcaagcgctttaaggtcaatggcagaaaaggaaatatcttcgtttcaaaactagacagaatgattctcatgaactcctttgtgatgtgtgcgttcaactcacagagtttaacctttgttttcatagagcagttaggaaacactctgtttgtaaagtctgcaagtggatattcagacctccttgaggccttttttggaaacgggatttcttcatattctgctagacagaagaattctcagtaacttccttgtgttgtgtgtattcaactcacagagttgaatgatcctttacacagaacagtcttgaaacactctttttgtggaatttggaagtggagatttcagccgctttgaggtcaatggtagaataggaaatatcttcctatagaaactagacagaatgattctcagaaactcctttgtgatgtgggcgttcaactcacagagtttaacctttcttttcatagagcagttaggaaacactctgtttgtaaagtctgcaagtggatattcagacatctttgaggctttcgttggaaacgggatttcttcatattctgatatacagaagaattctcagaaacttccttgtgttgtgtgtattcaactcacagagttgaacgatcgtttacacagagcagacttgagacactctttttgtggaatttgtaagtggagatttcagccgctttgaggtcaatggtagagaaggaaatatcttcatataaaaactagacagaatcattctcagaaactactctgcaatgtgtgcgttcaactctcagagtttaactcttcttttcattcagcagtttggaaacactctgtttgtaaactctgcacgtggatattttgaccacttagaggccttcgttggaaacgggtttttttcctgtaaggctagacagaagaattcccagtaacttccttgtgttgtgtgcattcaactcacagagttgaacgttcccttagacagagcagatttgaaacactctatttgtgcaatttgcaagtgtagttttcaagctctttaaggtcaacggcagaaaaggaaatatcttcgtttcaaaactagacagaatcattcccacaaactgcgttgtgatgtgttcgttcaactcacagagtttaacctttcttttcatagagcagttaggaaacagtctgtttgtaaattctgtaagtggatattctgacatcttgtggccttcgttggaaacgggatttcttcatattctgctagacagaagaattctcagtaacttccttgtgttgtgtgtattcaactcacagagttgaacgatcctttacacagagcagacatgaaacactctttttgtggaatttgcaagtggagatttcagccgctttggggtcaatggtagaaaaggaaatatcttcgtataaagactagacagaatgattctcagtaactcctttgtgatgtgtgcgttcaactcacagagtttaacctttcttttcatagagcagttaggaaacactctgtttgtaaagtctgcaagtggatattcagacctctttgaggccttcgttggaaacgggtttttttcatataaggctagacagaagaattcccagtaacttccttgtgttgtgtgtgttcaactcacagagttgaactttcatttacacagagcagatttgaaacactctttttgtggaatttgcaagtggagatttcaagcgctttgaggccaaaggcagaaaaggaaatatcttcgtttaaaaactagacagaatcattctcagaaactgctctgcgatgtgtgcgttcaactctcagagtttaacttttcttttcattcagcagtttggaaacactctgtttgtaaagtctgcacgtggatattttgaccatttagaggccttcgttggaaacgggtttttttcctgtaaggctagacagtagaattcccagtaacttccttgtgttgtgtacattcaactcacagagttgaacgttccctaagacagagcagatttgaaacactctttttgtgcaattggcaagtggttatttcagccgctttgaggtcaatggtagaaaaggaaatatcttcgtataaaaactagacagaatgattctcagaaactcctttgtgatgtgtgcgttcaactcacacagtttaacctttcttttcatagagcagttaggaaacactctgtttgtaaagtctgcaagtggatattcagacctccttgaggccttcgttggaaacgggatttcttcatattatgctagaaagaagaattctcagaaacttcgttgtgttgcgtgttttcaactcacagagttcaacgatcctttacacagagtagacttgaaacactctttttgtggaatttgcaagtggagatttcagccgcttagaggtcaatggtagaaaaggaaatatcttcgtataaaaactagacagaatgattctcagaaactcctttgtgatgtgtgcgttcaactcacagagttcaacctttcttttcatagagcagttgggaaacactctgtttgtaaagcctgcaagtggatattcagacttctttgaggccttcgttggaagcgggatttcttcatattctgctagacagaagaattcccagtaacttccttgtgttgtgtgtgttcaactcacagagttgaacgttccctcagacagagcagatttgaaacactctttttgtggaatttgcaagtggagatttcaagcgctttgaggccaaaggcagaaaaggaaatatcttcgtataaaaactagacagaatcattctcagaaactgctctgcgatgtgtgcgttcaactctcagagtttaacttttcttttcattcagcagtttggaaacactctgtttgtaaagtctgcacgtggataatttgaccacttagaggccttcgttggaaacgggtttttttcatgtaaggctagacagaagaattcccagtaacttccttgtgttgtgtgcattcaactcacagagttgaacgttcccttagacagagcagatttgaaacactctatttgtgcaatttgcaagcgtagatttcaagcgctttaaggtcaatggcagaaaaggaaatatcttcgtttcaaaactagacagaatcattcccacaaactgcgttgtgatgtgttcgttcaactaacagagtttaacctttctgttcatagagcagttaggaaacactctgtttgtaaagtctgtaagtggatattctgacatcttgtggccttcgttggaaacgggatttcttcatattctgctagacagaagaattctcagtaacttccttgtgttgtgtgtattcaactcacagagttgaaggatcctttacagagagcaggcttgaaacactctttttgtggaatttgcaagtggagatttcagccgctttgaggtcaatggtagaataggaaatatcttcttatagaaactagacagaatgattctcagaaactcctttgtgatgtgtgtgttcaactcacagagtttaacctttcttttcatagagcagttagtaaacactctgtttataaagtctgcaagtggatattcagacccctttggggccttcgttggaaacgggatttcttcatattatgctagacagaagatttcccagtaacttccttgtgttgtgtgttttcaactcacagagttgaactttcatttacacagagcagatttgaaacacactttttgtggaatttgcaaatggagatttcaagcgctttgaggccaaaggcagaaaaggaaatatcttcgtttcaaaactagacagaatcattctcagaaactgctctgcgatgtgtgcgttcaactctcagagtttaaattttcttttcattcagcagtttggaaacactctgtttgtaaagtctgcacgtggatattttgaccacttagaagccttcgttggaaacgggtttttttcctgtaaggctagacagaagaattcccagtaacttccttgtgttgtgtacattcaactcacagagttgaacgtttccttagacagagcagatttgaaacactctttttgtgcaattggcaagtggagatttcaagcgctttaaggtcaatggcagaaaaggaaatatcttcgtttcaaaactagacagaatcattcccacaaactgcgttgtgatgtgtacgttcaactcacagagtttaacctttctgttcatagagcagttaggaaacactctgtttgtaaagtctgtaagtggatattctgacatcttgtggccttcgttggaaacgggatttcttcatattctgctagacagaataattctcagtaacttccttgtgttgtgtgtattcaagtcacagagttgaacgatcctttacagagagcagacttgaaacactctttttgtggaatttgcaagtggagatttcagccgctttgaggtcaatgttagaaaaggaaatatcttcgtataaagactagacagaatgattctcagaaactcctttgtgatgtgtgcgttcaactcacagagttcaacctttcttttaatagagcagttgggaaacactctgtttgtaaagtctgcaagtggatattcagacttctttgaggccttcgttggaagcgggatttcttcatattcggctagacagaagaattctcggtaacttccttgtgttgtgtgtattcaactcacagagttgaacgatcctttacacagagcggacttgaaacactctttttgtggaatttgcaagtggagatttcagccgcgttgaggtcaatggtagaaaaggaaatatcttcgtataaaaactagacagaatgattctcagaaactcctttgtgatgtgtgcgttcaactcacagagttcaacctttcttttcatagagcagttaggaaacactctgtttgtaatgtctgcaagtggatattcagacctccttgaggccttcgttggaaacgggatttcttcatattatgctagacagaagaattctcagtaacttccttgtgttgtgtgtattcaactgacagacttgaactttcatttagagagagcagatttgaaacactgtttttgtggaatttgcaagtggagatttcaagcgctttggggccaaaggcagaaaaggaaatatcttcgtataaaaagtagacagaatcattctcagaaactgctctgcgatgtgtgcgttcaactctcagagtttaacttttcttttcattcagcagtttggaaacactctgtttgtaaggtctgcacgtggataatttgaccacttagaggccttcgttggaaacgggtttttttcatgtaaggctagacagaagaattcccagtaacttccttgtgttgtgtgcattcaactcacagagttgaacgttcccttagacagagcagatttgaaacactctatttgtgcaatttgcaagtgtagatttcaagcgctttaaggtcaatggcagaaaaggaaatatcttcgtttcaaaactagacagagtgattctcagaaactcctttgtgatgtctgcgttcaactcacagagtttaacgtttcttttcatagagcagttaggaaacactctgtttgtaaagtctgcaagtggatatacagacctccttgaggccttcgttggaaacgggatttcttcatattctgctatacagaagaattctcagaaacttccttgtgttgtgtgtattcaactcacagagttgaacgatcctttacacagaacagacttgagacactctttttgtggaatttgcaagtggagatttcagccgctttgaggtcaatggtagaaaaggaaatatcttcgtataaaaactagacagaatgattctcagaaactcctttgtgatgtgtgcgttcaactcacagagtttaacctttcttttcatagagcagttaggaaacactctgtttgtaaagtctgcaagtggatattcagacatccttgaggctttcgttggaaacgggatttcttcctattctgctagaaagaagaattcccagtaacttccttgtgttgtgtgtgttcgactcacagagttgaactttcatttacacagagcagatttgaaacactctttttgtggaatttgcaagtggagatttcaagcgctttgaggccaaaggcagaaaaggaaatatcttcgtttcaaaactaggcagaatcattctcagaaactgctctgcgatgtgtgcgttcaactctcagagtttaacttttcttttcattcagcagtttggaaacactctgtttgtaaagtctgcacgtggatattttgaccacttagaggccttcgttggtaacgggtttttttcctgtaaggctagacagaagaattcccagtaacttccttgtgttgtgtgcattcaactcacagtagttgaacgttcccttagacagagcagatttgaaacactctatttgtgcaatttgcaagtgtagttttcaagctctttaaggtcaacggcagaaaaggaaatatcttcgtttcaaaactagacagaatgattctcataaactcctttgtgatgtgtgcgttcaactcacagagtttaacttttcttttcatagagcagttaggaaacactctgtttgtaaagtctgcaagtggatattcagacctctttgaggccttcgttggaaacgggatttcttcatattatgctagacaaaataattctcagtaacttccttgtgttgtgtgtattcaactcacagagttgaacgatcctttacacagagcagacttgaaacactctttttgtggaatttgcaagtggagatttcatccaatttgaggtcaatagtagaaaaggaaatatcttcgtagaaaaactagacagaatgattctcagaaactcctttgtgatgtgtgcgttcaactcacagagtttaacctttcttttcatagagcagttaggaaacactctgtttgtaaagtctgcatgtggatattcagacatctttgaggctttcgttggaaacgggatttcttcatattctgctagacagaagaattctcagtaacttccttgtgttgtgtgtattcaactgacacagttgaactttcatttagagagagcagatttgaaacactgtttttgtggaatttgcaagtggagatttcaagcgctttcgggccaaaggcagaaaacgaaatatcttcgtataaaaactagacagaatcattctcagaaactgctctgcgatgtgtgcgttcaactctcagagtttaacttttcttttcattcagcagtttggaaacactctgtttgtaaagtctgcacgtggatattttgaccacttagaggccttcgttggaaacgggtttttttcatgtaaggctagacagaagaattcccagtaacttccttgtgttgtgtacattcaactcacagagttgaacgttcccttagacagagcagatttgaaacactctttttgtgcaattggcaagtggtgatttcagccgctttgaagtctatggtagaaaaggaaatatcttcgtataaaaactagacagaatcattcccacaaactgcgttgtgatgtgttcgttcaactcacagagtttaacctttctgttacatagagcagttaggaaacactctgtttgtaatgtctgtaagtggatattctgacatcttgtggccttcgttggaaacgggatttcttcatattctgctagacagaataattctcagtaactttccttgtgttgtgtgtattcaactcacagagttgaaggatcctttacagagagcaggcttgaaacactctttttgtcgaatttgcaagtggagatttcagccgctttgaggtcaatggtagaataggaaatatcttcttatagaaactagacagaatgattctcagaaactcctttgtgatgtgtgtgttcaactcacagagtttaacctttcttttcatagagcagctagtaaacactctgtttataaagtctgcaagtggatattcagacccctttgaggccttcgttggaaacgggatttcttcatattatgctagacagaagaattcccagtaacttccttgtgttgtgtgtgttcaactcacagagttgaactttcatttacacagagcagatttgaaacactctttttgtggaatttgcaaatggagatttcaagcgctttgaggccaaaggcagaaaaggaaatatctttgtataaaaactagacagaatcattctcagaaactgctctgcgatgtgtgcgttcaactctcagagtttaacttttcttttcattcagcagtttggaaacactctgtttgtaaagtctgcacgtggatatttcgaccacttagaggccttcgttggaaacgggtttttttcctgtaaggctagacagaagaattcccagtaacttccttgtgttgtgtacattcaactcacagagttgaacgttcccttagacagagcagatttgaaacactctttttgtgcaattggcaaatggagatttcaagcgctttaaggtcaatggcaggaaaggaaatatcttcgtttcaaaactagacagaatgattctcagaaaatcctttgtgatgtgtgcgttcaactcacagagtttaacttttcttttcatagagcagttaggaaacactctgtttgtaaagtctgcaagtggatattcagacctctttgaggccttcattggaaacgggatttcttcatattatgctagacagaataattctcagtaacttccttgtgttgtgtgtattcaactcacagagttgaacgatcctttacagagagcagacttgaaacactctttttgtggaatttgcaagtggagatttcagccgctttgaggtcaatggtagaataggaaatatcttcctatagaaactagacagaatgattctcagaaactcctttgtgatgcgtgcgttcaactcacagagtttaacctttcttttcatagagcagttgggaaacactctgtttgtaaagtctgcaagtggatattcagacttctttgaggctttcgttggaaacgggatttcttcatattctgctagaaagaagaattcccagtaacttccttgtgttgtgtgtgttcaactcacagagttgaactttcatttacacagagcagatttgaaacactctttttgtggaatttgcaagtggagatttcaagcgctttgaggctaaaggcagaaaaggaaatatcttcgtataaaaactagacagaatcattctcagaaactgctgcgtgatgtgtgcgatcaacactcagagtttaacttttcttttcattcagcggtttggaaacactctgtttgtaaagtctgcacgtggaaattttgacaacttagagaccttcgttggaaacgggattttttcatgtaaggctagacagaagaattcccagtaacttccttgtgttgtgtacattcaactcacagagttgaacgttcccttagacagagcagatttgaaacactctttttgtgcaattggcaaatggagatttcaagcgctttaaggtcaatgcagaaaaggaaatatcttcgtttcaaaactaggcagaatcattcccacaaactgcgttgtgatgtgttcgttcaactcacagagtttaacctttatgttcatagagcagttaggaaacactctgtttgtaaagtctgtaagtggatattccgacatcttgtggccttcgttggaaacgggatttcttcatattctgctagacggaagaattctcataaacttccttgtgttgtgtgttttcaactcacagagttgaacgatcctttacacagagcagacttgaaacactccttttgtggaatttgcaagtggagatttcagccgctttgaggtcaatggtagaataggaaatatcttcctatagaaactagacagaatgattctcagaaacttctttgtgatgtgtgcgttcaactcacagagtttaacctttcctttcatagagcagttaggaaacactctgtaaactctgcaagtggatattcagacctctttgaggccttcgttggaaacgggatttcttcatactatgctagacagaagaattctcagtaacttccttgtgttgtgtgtattcaactgacagagttgaacattcatttagagagagcagatttgaaacactgtttttgtggaatttgcaagtggagatttcaagcgctttggggccaaaggcagaaaaggtaatatcttcgtataaaaactagacagaatctttctcagaaactgctctgcgatgtatgcgttcaactctcagagtttaacttttcttttcattcagcagtttggaaacactctgtttgtaaagtctgcacgtggatattttgaccacttagaggccttcgttggaaacgggtttttttcctgtaaggctagacagaagaattcccagtaacttccttgtgttgtgtacattcaactcacagagttgaacgttcccttagacagagcagatttgaaacactctttttgtgcaattggcaaatggagatttcaagcgctttaagttcaatggcagaaaaggaaatatcttcgtttcaaaactagacagaatgattctcagaaactcctttgtgatgtgtgcgttcaactcacagagtttaacttttcttttcattcagcagtttggaaacactctgtttgtaaagtctgcacgtggataatttgaccacttagaggccttcattggaaacgggtttttttcatgtaaggctagacagagcaattcccagtaacttccttgtgttgtgtacattcaactcacagagttgaacgttcccttagacagaacagatatgaaacactctttttctgcaattggcaagtggtgatttcagccgctttgaggtcaatggtagaaaaggaaatatcttcgtataaaaactagacagaatgattctcagaaacttcattgtgacgtgtgcgttcaactcacagagtttaacctttcttttcatagagcagttaggaaacactctgtttgtaaagtctgcaagtggatattcagacctctttgaggccttcgttggaaacgggatttcttcatactgtgctagacagaagaattctcagtaacttccttgtgttgtgtgtattcaactcacagagttgaacgatcctttacacagagcggacttgaaacacactttttgtggaacttgcaagtggagatttcagccgcgttgaggtcaatggtagaaaaggaaatatcttcgtataaaaactagacagaatgattctcagaaactcctttgtgatgtgtgtgttcaactcacagagtttaacctttcttttcatagagcagttaggaaacactctgtttgtaaagtctgcaagaggatattcagacctctttgaggccttctttggaaacgggtttttttcatataaggctagacggaagaattcccagtaacttccttgtgttgtgtgtgttcaactcacagagttgaactttcatttacacagagcacatttgaaacactctttttgtggaatttgcaaatggagatttcaagcgctttgaggccaaaggcagaaaaggaaatatcttcgtataaaaactagacagaatcattctcagaaactgctctgcgatgtgtgcgttcaactctcagagtttaacttttcttttcattcagcagttcggaaacactctgtttgtaaagtctgcacgtggataacttgaccacttagaggccttcgttggaaacaggtttttttcacgtaaggttagacggaagaattctcagtaacttccttgtgttgtgtgtattcaactcacagagttgaacgatcctttacacagagcagacttgaaacactctatttgtagaatttgcaagtggagatttcagccgctttgacgtcaatagtagaaaaggaaatatcttcgtagaaaaactagacagaatgattctcagaaactcctttgtgatgtgtgcgttcaactcacagagtttaacctttctgttcatagagcagttaggaaacactctgtttgtaaagtctgcaagtggatattcagatctccttgaggccttcgttggaaacgggatttcttcatattctgctagacagaagaattcccagtaacttccttgtgttgtgtgtgttcaactcacagagttgaactttcatttacacagagcagatttgaaacactctttttgtggaatttgcaaatggagatttcaagcgctttgaggccaaaggcagaaaaggaaatatcttcgtataaaaactagacagaatcattctcagaaactgctctgcgatgtgtgcgttcaactctcagagtttaacttttcttttcattcagcagtttggaaacactctgtaaagtctgcacgtggataacttgaccacttagaggccttcgttggaaacgggtttttttcctgtaaggctagacaaaagaattcccagtaacttccttgtgttgtgtacattcaactcacagagttgaacgttcccttagacagagcagatttgaaacactctttttgtgcaattggcaagtggagatttcaagcgctttgaggtcaatggcagaaaaggaaatatcttcgtttcaaaactagacagaatcattcccacaaactgcgttgtgatgtgttcgttctactcacagagtgtaacctttcttttcatagagcagttaggaaacagtctgtttgaaaattctgtaaggggatattctgacatcttgtggccttcgttggaaacgggatttcttcatattctgctagacagaagaattctcagtaacttccctgtgttgtgtgtattcaactcacagagttgaatgatcctttacacagagcagacttgaaacactctttttgtggaatttgcaagtggagatttcagccgctttgagttcaatggtagaataggaaatatcttcctatagaaactagacagaatgattctcagaaactcctttgtgatgtgtgcgttcaactcacagagtttaacctttcttttcatagagcagttaggaaacactctgtttgtaaagtctgcaagtggatattcagacctctttgaggccttcgttggaaacgggtttttttcatataagctagacagaagaattcccagtaacttccttgtgttgtgtgtgttcaactcacagagttgaactttcatttacacagagcagatttgaaacactctttttgtggaatttgcaagtggagatttcaagcgctttgaggccaaaggcagaaaagttaatatcttcgtttgaaaactagacagaatcattctcagaaactgctgcgtgatgtgtgcgttcaactctaagagtttaactattcttttcattcagcggtttggaaacactctgtttgtaaagtctgcacgtggatattttgaccacttagaggccttcgttggaaacgggttttttgcatgtaaggctagacagaagaattcccagtaacttccttgtgttgtccacattcaactcacagagttgaacgttcccttagacagagcagatttgaaacactctttttgtgcaattggtaagtggtgatttcaggcgctttgaggtcaatggtagaaaaggaaatatcttcgtataaaaactagacagaaatgattctcagaaactcctttgagatgtgtgtgttcaactcacaggagtttaacctttcttttcatagagcagttaggaaacactctgtttgtaaactctgcaagtggatattcagacctctttgaggccttcgttggaaaccggatttcttcatactgtgctagacagaagaattctcattaacttccttgtgttgtgtttattcaactcacagagttgaatgatcctttacacagagcagacttgaaacactctttttgtggaatttgcaagtggagatttcagccgctttgaggtcaatggtagaaaagtaaatatcttcgtataaagactagacagaatgattctcagaaactcctttgtgatgtgtgcgttcaactcacacagtttaacctttcttttcatagagctgttaggaaacactctgtttgtaaagtctgcaagtggatattcagacctccttgaggccttcgttggaaacgggatttcttcatattctgctagaaagaagaattctcagtaacttccttgtgttgtgtgtactcaactcacagagttgaacgatcctttacacaaagcagacttgaaacactcttttagtggaatttgcaagtggagatttcagccgctttgaggtcaatagtagaaaaggaaatatcttcgtagaaaaactagacagaatcatgctcagaaactgctctgcgatgtgtgcgttcaactctcagagtttaacttttcctttcattcagcagtttggaaacactctgtttgtaaagtctgcacgtgcataatttgaccgcttagaggccttcgttggaaacgggtttttttcatgtaaggctagacagaagaattcccagtaacttccttttgttgtgtgcattcaactcacagagttgaacgttcccttagacagagcagatttgaaacactctatttgtgcaatttgcaagtgtagatttcaagcgctttaaggtcaatggcagaaaaggaaatatcttcgtttcaaaactagacagaatcattcccacaaactgcgttgtgatgtgttcgttcaactcacagagtttaacctttctgttcatagagcagttaggaaacactctgtttgtaaagtctgtaagtggatattctgacatcttgtggcgttcgttggaaacgggatttcttcatattctgctagacagaagaattctcagtaacttccttgtgttgtttgtattcaactcacagagtggaacgatcctttacacagagcagacttgaaacactctttttgtggaatttgcaagtggagatttcagccgctttgaggtcaatggtagaaaaggaaatatcttcgtaaaaaaactagacagaatgattctcagaaactcctttgtgatgtgtgcgttcatctcacagggtttaacctttcttttcatagagcagttaggaaacactcggtttgtaaagtctgcacgtggatatttggacttctttgaggccttcgttggaaacgggttttttcatgtaaggctagacagaagaattcccagtaacttcccttgtgttgtgtgtgttgaactcacagagttgaactttcatttagacagagcagatttgaaacactctttttgtggaatttgcaaatggagaattcatgcactttgaggccaaaggcagaaaaggaaatatcttcgtataaaaactagacagaatcattctcagaaactgctgcgtgatgtgcgcgttcaactctcagaatttaacttttcttttcattcagcggtttggaaacactgtgtttgtaaagtctgcacgtggatattttgaccacttagaggccttcgttggaaacgggtttttttcatgtaaggctagacagaagaattcccagtaacttccttgtgttgtgtgcattcaactcacagagttgaacgttcccttagacagagcagatttgaaacactctatttgtgcaatttgcaagtgtagatttcaagcgctttaaggtcagtggcagaaaaggaaatatcttcgtttcaaaactagacagaatcattcccacaaactgcgttgtgatgtgttcgttcaactcacagagtttaacctttctcttcatagagcagttaggaaacactctgtttgtaaagtctgtaagtggatattctgacatcttgtggccttcgttggaaaagggatttcttcatattctgctagacagaagaattctcagtaacttccttgtgttgtgtgtattcaactcacagagttgaacgatcctttacacagagcagacttgaaacacactttttgtggaatttgcaagtggagatttcagccgctttgaggtcaatggtagaataggaaatatcttcctatagaaactagacagacaatgattctcagaaactcctttgtgatgtgtgcgttcaactcacagcagtttaacctttcttttcatagagcagttaggaaacactctgtttgtaaagtctgcaagtggatattcagacctctttgaggccttcgttggaaacgggtttttttcatataaggctagacagaagaattcccagtaacttccttgtgttgtgtgtgttcaactcacagagttgaactttcatttacacagagcagatttgaaacactctttttgtggaatttgcaagtggagatttcaagcgctttgaggccaaaggcagaaaaggaaatatcttcgtttcaaaactggacagaatcattctcagaaactgctctgcgatgtgtgcgttcaactctcagagtttaacttttcttttcattcagcagtttggaaacactctgtttgtaaagtctgcacgtggataatttgaccacttagaggccttcgttggaaacgggtttttttcatgtaaggctagacagaagaattcccaggaacttccttgtgttgtgtacattcaactcacagagttgaacgttcccttagacagagcagatttgaaacactctttttgtgcaattggcaagtggtgatttcagccgctttgaggtcaatggtagaaaaggaaatatgttcgtataaaaactagacagaatgattctcagaaactcctttgtgatgtgtgcgttcaactcacagagtttaacctttcttttcatagagcagttaggaaacactctgtttgtaaactctgcaagtggatatttagacctctttgaggccttcgttggaaacgggatttcttcatactgtgctagacagaagaattctcagaaacttccttgtgttgtgtgttttcaactcacagagttgaacgatgctttacactgagtagacttgaaacacactttttgtgtaatttgcaagtggagatttcagccgctttgagttcaatggtagaaaaggaaatatcttcgtataaaaactagacagaatgattctcagaaacttctttgtgatgtgtgcgttcaactcacagagtttaacctttcttttcatagagcagttaggaaacactctgtttgtaaagtctgcaagtggatattcagacctccttgaggccttcgttggaaacgggtttttttcatataaggctagacagaagaattctcagtaacttccttgtgttgtgtgtattcaagtgacagagttgaactttcatttagagagagcagatttgaaacactgtttttgtggaatttgcacgtggagatttcaagcgctttggggccaaaggcagaaaaagatatatcttcgtataaaaactagacagaatcattctcagaaactgctgcgtaatgtgtgcgttcaactctcagagtttaacttttcttttcattcagcggtttggaaacactctgtttgtaaagtctacacgtggaaattttgaccacttagaggccttcgttggaaacgggtttttttcatgtaaggctagacagaagaattcccagtaacttccttgtgttgtgtgcattcaactcacagagttgaacgttcccttagacagagcagatttgaaacactctatttgtgcaatttgcaagtgtagttttcaagctctttaaggtcaacggcagaaaaggaaatatcttcgtttcaaaactagacagaatgattctcataaactcctttgtgatgtgtgcgttcaactcacagagtctaacctttcttttcatagagcagttaggaaacactctgtttgtaaagtctgcaagtggatattcagacctccttgaggccttcgttggaaacgggatttcttcatattctgctagacagaagaattctcagtaacttccttgtgttgtgtttattcaactcacagagttgaatgatcctttacacagagcagacttgaaacactctttttgtggaatttgcaagtggagatttcagccgctttgaggtcaatggtagaaaagtaaatatcttcgtataaagactagacagaatgattctcagaaacttctttgtgatgtgtgcgttcaactcacagagtttaacctttcttttcatagagcagttaggaaacactctgtttgtaaactctgcaagttgatattcagacctctttgaggccttcgttggaaacgggatttcttcatactatgctagacagaagaattctcagtaacttccgcgtgttgtgtgtattcaactcacagagttgaacgatcctttacacagagcagacttgaaacactctttttgtggaatttgcaagtggagatttcagccgctttgaggtcaaaggtagaaaaggaaatatcttcctataaaaactagacagaatcattcccacaaactgcgttgtgatgtgttcgttcaactcacagagtttaacctttcttttcatagagcagttaggaaacactctgttggtaaattctgtaagtggatattctgacatcttgtggcctaccgttggaaacgggatttcttcatattctgctagacagaagaattcccagtaacttccttgtgttgtgtgcattcaactcacagagttgaacgttcccttagacagagcagatttgaaacactctatttgtgcaatttgcaagtgtagatttcaagctctttatggtcaacggcagaaaaggaaatatcttcgtttcaaaactagacagaatcattcccacaaactgcgttgtgatgtgttcgttcaactcacagagtttaacctttctgttcatagagcagttaggaaacactctgtttgtaaagtctgcaagtggatattcagacctccttgaggccttcgttggaaacgggatttcatcatattatgctagacagaagaattctcagtaacttccttgtgttgtgtgtattcaactcacagagttgaacgatcctttacagagagcagacttgaaacactctttttgtggaatttgcaagtggagatttcagccgctttgaggtcaatggtagaaaaggatatatcttcgtataaagaatagacagaatgattctcagaaactcctttgtgatgtgtgcgttcaactcacagagtttcacctttcttttcatagagcagttaggaaacactctgtttgtaaagtctgcaagtggatattcagacctccttgaggccttcgttggaaacgggatttcttcatattctgctagacagaagaattcccagtaacttccttgtgttgtgtgtgttcaactcacagagttgaactttcatttacacagagcagatttgaaacactctttttgtggaatttgcaaatggagatttcaagcgctttgaggccaaagacagaaaaggaaatatcttcgtataaaaactagacagaatcattctcagaaactgctgcgtgatgtgtgcgttcaactctcagagtttaacttttcttttcattcagcggtttggaaacactctgtttgtaaattctgcacgtggaaattttgaccacttagaggccttcgttggaaacgggtttttttcatgtaaggctagacagaagaattcccagtaacttccttgtgttgtgtgcattcaactcacagagttgaacgttcccttagacagagcagatttgaaacactctatttgtgcaatttgcaagtgtagatttcaagcgctttaaggtcaacggcagaaaaggaaatatcttcgtttcaaaactagacagaatgattctcagaaactcctttgtgatgtgtgcgttcaactcacagagtttaacctttctgttcatagagcagttaggaaacactctgtttgtaaagtctgcaagtggatattcagacctcctttaggccttcgttggaaacgggatttcttcatattctgctagacagaagaattctcagtaacttccttgtgttgtgtgtattcaactcacagagttgaacaatcctttacacagagcagacttgaaacactctttttgtggaatttgcaagtggagatttcagccgctttgaggtcaatggtagaaaaggaaatatcttcgtataaagactagacagaatgattctcagaaactcctttgtgatgtgtgcgttcaactcacagagtttaaactttcttttcatagagcagttaggaaacactctgtttgtaaagtctgcaagtggatattcacacatccttgaagctttcgttggaaacgggatttcttcatattctgctagaaagaagaattcccagtaacttccttgtgttgtgtgtgttcaactcacagatttgaactttcatttacacagagcagatttgaaacactctttttgtggaatttgcaagtggagatttcaagcgctttgaggccaaaggcagaaaaggaaatatcttcgtttcaaaactagacagaatcattctcagaaactgctgcgtgatgtgtgcgttcaactctcagagtttaacttttcttttcattcagcggtttggaaacactctgtttgtaaagtctgcacgtggaaattttgaccacttagaggccttcgttggaaacgggtttttttcatgtaaggctagagagaagaattcccagtaacttccttgtgttgtgtgcattcaactcacagagttgaacgttcccttagacagagcagatttgaaacactctatttgtgcaatttgcaagtgtagatttcaagcgctttaaggtcaacggcagaaaaggaaatatcttcgtttcaaaactagacagaatgattctcagaaactcctttgtgatgtgtgtgtccaactcacagagtttaacctttcttttcatagagcagttaggaaacactctgtttgtaaagtctgcaagaggatattcagacctctttgaggccttcgttggaaacgggtttttttcctgtaaggctagacagaagaattcccagtaacttccttgtgttgtgtgtgttcaactcacagagttgaactttcatttacacagagcagatttgaaacactctttttgtggaatttgcaaatggagatttcagccgcgttgaggtcaatggtagaaaaggaaatatcttcgtttcaaaactagacagaatgattctcagaaactcctttgtgatgtgtgcgttcaactcacagagtttaacctttcttttcatagagcagttaggaaacactctgtttgtaaagtctgcacgtggatatttggacttctttgaggccttcgttggcaacggggttttttcatataaggctagacagaagaattctcagtaacttccttgtgttgtgtgtattcaactgacagagttgaactttcatttagagagagcagatttgaaacactgtttttgtggaatttgcaagtggagatttcaagcgctttggggccaaaggcagaaaaggaaatatcttcgtataaaaactcagcagaatcattctcagaaactgctctgcgatgtgtgcgttcaactctcagagtttaacttttcttttcattcagcagttaggaaacactctgtttgtaaagtctgcaagtggatattcagacctctttgaggccttcgttggaaacgggtttttttcatataaggctagacagaagaattcccagtaacttccttgcgttgtgtacattcaactcacagagttgaacgttcccttagacagagcagatttgaaacactctttttgtgcaattggcaagtggagatttcaagcgctttaaggtcaatggcagaaaaggaaatatcttcgtttcaaaactagacagaatgattctcagaaactcctttctgatgtgtgcgttcaactcgcagagtttaacttttcttttcatagagcagttaggaaacactctgtttgtaaagtctgcaagtggatattcagacctctttgaggccttcgttggaaacgggatttcttcatattctgctagacagaagaattctcagaatcttcccttgtgttgtgtgtattcaactcacagagttgaaagaccctttacacagagcggacttgaaacactctttttgtggaatttgcaagtggagatttcagccgcgttgaggtcaatggtagaaaaggaaatatcttcgtataaaaactagacagaatgattctcagaaactcctttgtgatgtgtgcgttcaactcacagagtttaacctttctattcatagagtagttaggaaacactctgtttgtaatgtctgcaagtggatattttgacctctttgaggccttcgttggaaacgggtttttttcatgtaaggctagacagaagaattcccagtaacttccttgtgttgtgtgtgttcaactcacagagttgaactttcatttacacagagcagatttgaaacactctttttgtggaatttgcaagtggagacttcaagcgctttgaggccaaaggcagaaaaggaaatatcttcgtttcaaaactagacagaatcattctcagaaactgctgcatgatatgtgcgttcaactctcagagtttaacttttcttttcattcagcggtttggaaacactctgtttgtaaagtctgcacgtggatattttgaccacttagaggccttcgttggaaacgggtttttttcatgtaaggctagacagaagaattctcagtaacttccttgtgttgtgtgtattcaactcacagagttgaacgatcctttacacagagcagacttgaaacactctatttgtgcaatttgcaagtgtagatttcaagcgctttaaggtcaatggcagaaaaggaaatatcttcgttttaaaactagacagaatcattcccacaaactgcgttgtgatgtgttcgttcaactcacagagtttaacctttctgttcatagagcagtgaggaaacactctgtttgtaaagtctgtaagtggatattctgacatcttgtggccttcgttggaaacaggatttcttcatattctgctagacagaataattctcagtaacttccttgtgttgtgtgtattcaactcacagagttgaaggatcctttagagagagcaggcttgaaacactctgtttgtcgaatttgcaagtggagatttcagccgctttgaggtcaatggtagaataggaaatatcttcttatagaaactagacagaatgattctcagaaacttctttgtgatgtgtgcgttcaactcacagagtttaacctttcttttcatagagcagttaggaaacactctgtttgtaaactctgcaagtggatattcagacctgtttgaggccttcgttggaaacgggatttcttcatactatgctagacagaagaattctcagtaacttccttgtgttgtgtgtattcaactcacagagttgaacgatcctttacacagagcagacttctaacactctttttgtggaatttgcaagtggagatttcagccgctttgaagtcaaaggtagaaaaggaaatatcttcctataaaaactagacagaatgattctcagaaactcctttgtgatgtgtgcgttcaactcacagagattaacctttcttttcatagagcagttaggaaacactctgtttgtaaagtcttcaagtggatattcagacctctttgaggccttcgttggaaacgggatttcttcatattctgctagacagaagaattctcagtaacttccttgtgttgtgtgtattcaactcacagagttgaacggatcctttacacagagcagacttgaaacactctatttgtgcaatttgcaagtgtagatttcaagcgctttaaggtcaatggcagaaaaggaaatatcttcgttttaaaactagacagaaatcattcccaaaaactgcgttgtgatgtgttcgttcatctcacagagtttaacctttcttttcatagagcagttaggaaacagtctgtttgtaaattctgtaagtggatattctgacatcttgtggccttcgttggaaacgggatttcttcatattctgctagacagaataattctcagtaacttccttgtgttgtgtgtattcaactcacagagttgaacggtcctttacacagagcagacttgaaacattctttttgtggaatttgcaagtggagatttcagccgctttgaggtcaatggtagaataggaaatatcttcctatagaaactagacagaatgattctcagaaactcctttgtgatgtgtgcgttcaactcacagagtttaacctttcttttcatagagcagttaggaaacactctgtttgtaaagtctgcaagtggatattcagacctccttgaggccttcgttggaagcgggatttcttcatgttcagctagacagaagaattctcagaaacttccttgtgttgtgtgttttcaactcacagagttgaacgatcctttacacagagcagacttgaaacactctttttgtggaatttgctagtggagatttcagccgctttgaggtcaatggtagaataggaaatatcttcctatagaaactagacagaacgattctcagaaactcctttgtgatgtgtgcgttcaactcacagtagtttaacttttcttttcatagagcagttaggaaacactctgtttgtaaagtctgcaagtggatattcagacctctttgaggccttcgttggaaacgggatttcttcctattctgctagacagaataaatctcagtaacttccttgtgttgtgtgtattcaactcacagagttgaacgatcctttacacagagcagacttgaaacactctttttgtggaatttgcaagtggagatttcagccgctttgaggtcaatagtagaaaaggaaatatcttcgtagaaaaactagacagaatcattcccacaaactgcgctgtgatgtgctcgttcaactcacagagtttaacctttctgttcatagagcagttaggaaacactctgtttgtaaagtctgtaagtggatattctgacatcttgtggccttcgttggaaacgggttttcctcatattctgccagacagaagaattctcagtaacttccttgtgttgtgtgtattcaactcacagagttgaacgatcctttacacagagcagacttgaaactctctttttgtggaatttgcaagtggagatttcagccgctttgaggtcaatggtagaataggaaatatcttcctatagaaaatagacagaatgattctcagaaactcctttgtgatgtgtgcgttcaactcacagattttaacctttcttttcatagagcagttaggaaacactctgcttgtaaagtctgcaagtggatattcagccctctttgaggccttcgttggaaacgggtttttttcatataaagctagacagaaggattcccagtaacttccttgtgttgtgtgtgttcaactcacagagttgaactttcatttacaatgagcagatttgaaacactctttttgtggaatttgcaagtggagatttcaagcgctttgaggccaaaggcagaaaaggaaatatcttcgtataaaaactagacagaatcattctcagaaactgctctgtgatgtgtgcgttcaactctcagagtttaacttttcttttcattcagcagtttggaaacactctgtttgtaaagtctgcacgtggataatttgatcacttagaggccttcgttggaaaggggtttttttcatgtaaggctagacagaagaattcccagtaacttccttgtgttgtgtgcattcaactcacagagttgaacgttcccttagacagagcagatttgaaacactctatttgtgcaatttgcaagtgtagttttcaagctctttaaggtcaacggcagaaaaggaaatatcttggtttcaaaactagacagaatgattctgagatatcctttgtgatgtgtgcgttcaactcacagagttcaacctttcttttcatagagcagttaggaaacactctgtttgtaaagtctgcaagtggatattcagacctccttgaggccttcgttggaaacgggatttcttcatattatgctagacagaggaattctcaggaacttccttgtgttgtgtgtattcaactcacagagttgaacgatcctttacacagagcagacttgaaacactctttttgtggaatttgcaagtggagatttcagccgctttgagttcaatggtagaataggaaatatcttcctatagaaactacacagaatgattctcagaaactcctttgtgatgtgtgcgttcaactcacagagtttaacctttcttttcatagagcagttaggaaacactctgtttgtaaagtctgcaagtggatattcagacctctttgaggccttcgttggaaacgggatttcttcctattctgctagacagaagaattctcagtaacttccttgtgttgtgtgtattcaactcacagagttgaacgatcctttacacagagcagacttgagacactctttttgtggaatttgcaagtggagatttcagccgctttcaggtcaatagtagaaaaggaaatatcttcgtagaaaaactagacagaatcattctcagaaactgctgcgtgatgtgtgcgttcaactctcagagtttaacttttcttttcattcagcgttttggaaacactctgtttgtaaagtctgcacgtggatattttgaccacttagaggccttcgttggaaacgggttttttttcatgtaaggctagacagaagaattcccagtaacttccttgtgttgtgtgcattcaactcacagagttgaacgttcccttagacagagcagatttgaaacactctatttgtgcaatttgcaagtgtagatttcaagcgctttaaggtcaacggcagaaaaggaaatatcttcgtttcaaaactagacagaatgattctcagaaactcctttgtgatgtgtgcgttcaactcacagagtttaacctttctgttcatagagctgttaggaaacactctgtttgtaaagtctgcaagtggatattcagacctccttgaggccttcgttggaaacgggatttcttcctattctgctagacagaataattctcagtaacttccttgtgttgtgtgtattcaactcacagtagttgaacgatcctttacacagagcagacttgaaacactctttttgtggaatttgcaagtggagatttcagccgctttgaggtcaatagtagaaaaggaaatatcttcgtagaaaaactagacagaatgattctcagaaactccttgttgatgtgtgcgttcaactcacagagtttaacttttcttctcatagagcagttaggaaacactctgtttgtaaagtctgcaagtggatattcagacctctttgaggccttcgttggaaacgggttttcttcatattatgctagacagaagaattcccagtaactttccttgtgttgtgtgtgttcaactcacagagttgaactttcatttacacagagcagatttgaaacactctttttgtggaatttgcaagtggagatttcaagcgctgtgaagccaaaggcagaaaaggaaatatcttcgtataaaaactagacagaatcattctcagaaactgctctgcgatgtgtgcgttcaactctcagagtttaacttttcttttcattcagcagtttggaaacactctgtttgtaaagtctgcacgtggataatttgaccccttagaggccttcgttggaaacgggtttttttcatgtaaggctagacagaagaattcccagtaacttccttgtgttgtgtgcattcaactcacagagttgaacgttcccttagacagagcagatttgaaacactctatttgtgcaatttgcaagtgtagatttcaagcgctttaaggtcaaaggcagaaaaggaaatatcttcgtttcaaaactagacagaaatcattcccacaaactgcgttgtgatgtgttcgttcaactcacagtagtttaacctttctgttcatagagcagttaggaaacactctgtttgtaaagtctgtaagtggatattctgacatcttgtggccttcgttggaaacgggatttcttcatattctgctagacagaagaattctcagtaacttccttgtgttgtgtgtattcaactcacagagttgaacgatcctttacacagagcagacttgaagtactctttttgtggaatttgcaagtggagatttcagccgctttgaggtcaatggtagaaaaggaaactaccttcatataaagactagacagaatgattctcagaaaatcttttgtgatgtgtgcgttcaactcacagagtttaacttttcttctcatagagcagttaggaaacactctgtttgtaaagtctgcaagtggatattcagacctctttgaggccttctttggaaacgggatttcttcatattctgctagacagaagaattcccagtaacttccttgtgttgtgtgtgttcgactcacagagttgaactttcatttacacagagcagatttgaaacactctttttgtggaatttgcaagtggagatttcaagcgctttgaggccaaaggcagaaaaggaaatatctttgtttcaaaactagacagaatcattctcagaaactgctctgcgatgtgtgcgttcaactctcagagtttaacttttcttttcattcagcagtttggaaacactctgtttgtaaagtctgcacgtggatattttgaccacttagtggccttcgttggaaacgggttttcttcctgtaagtctagacagaagaattcccagtaacttccttgtgttgtgtacattcaactcacagagttgaacgttcccttagacagagcagatttgaaacactctttttgtgcaattggcaaatggagatttcaatcgctttaaggtcaatggcagaaaaggaaatatcttcgtttcaaaactagacagacatcattcccacaaactgcgttgtgatgtgttcgttcatctcacagagtttaacctttcttttcatagagcagttaggaaacagtctgtttgtaaattctgtaagtggatattctgacatcttgtggccttcgttggaaacgggatttcttcatattctgctagacagaagaattctcagaatcttccttgtgttgtgtgtattcaactcacagagttgaatgatggtttacacagagcagatttgaaacactctttttgtggaatttgcaagtggacatttcagccgctttgaggtcaatggtagaaaaggaaatatcttcgtataaaaactagacagaatgattctcagaaactcctttgtgatgtgtgtgttcaactcacagagtttaacctttcttttcatagaacagttagtaaacactctgtttataaagtctgcaagtggatattcagacccatttgaggccttcgttggaaacgggatttcttcatattatgctagacagaagaattcccagtaacttccttgtgttgtgtgtgttcagctcacagaggtgaactttcatttacacagagcagatttgaaacactctttttgtggaatttgcaagtggagatttcaagcgctttgaggccaaaggcagaaaaggaaatatcttcgtataaaaagtagacagaatcatactcagaaactgctgcgtgatgtgtgcgttcaactctcagagtttaacttttcttttcattcaacggtttggaaacactctgtttgtaaagtctgcacgtggatattttgaccacttagaggccttcgttagaaacgggtttttttcatgtaaggctagacagaagaattcccagtaacttccttgtgttgtgtacattcaactcacagagttgaacgttcccttagacagagcagatttgaaacacactttttgtgcaattggcaagtggtgatttcagccgctttgaggtcaatggtagaaaaggaaatatcttcgtataaaaactagacagaatcattcccacaaactgcgttgtgatgtgttcgttcaactcacagagtttaacctttcttttcatagcgcagttaggaaacagtctgtttgaaaattctgtaagtggatattctgacatcttgtggccttcgttggaaacgggatttcttcatattctgctagacagaagaattctcagtaacttccttctgttgtgtgtattcaactcacagagttcaacgattctttacacagagcagacttgagacactgttttcgtggaatttgcaagtggagatttcaaccgctttgaggtcaattgtagaaaaggaaatatcttcgtataaaaactagacagaacgattctcagaaactcctttgtgatgtgtgcgttcaactcacagagtttaacttttcttttcatagagcagttaggaaacactctgtttgtaaagtctgcaagtggatattcagacccctttgaggccttcgttgaaaacgggatttcttcatattctgctagacagaagaattcccagtaacttccttgtgttgtgtgtgttcaactcacagagttgaactttcatttacacagagcagatttgaaacactctttttgtggaatttgcaagtggagatttcaagcgctttgaggccaaaggcagaaaaggaaatatattcgtataaaaactagacagaatcattctcagaaactgctctgcgatgtgtgcgttcaactctcagagtttaacttttcttttcattcagcagtttggaaacactctgtttgtaaagtctgcaagtggatattttgacctctttgaggccttcgttggaaacgggtttttttcatgtaaggctagacagaagaattcacagtaacttccttgtgttgtgtacattcaactcacagagttgaacgttcccttagacagagcagatttgaaacactctttttgtgcaattggcaagtggagatttcaagcgctttaaggtcaatggcagaaaaggaaatatcttcctttcaaaactagacagaatcattcccacaaactgcgttgagatgtgttcgttcaactcacagagtttaacctttcttttcatagagcagttaggaaacagtctgtttgtcaattctgtaagtggatattctgacatcttgtggccttcgatggaaacgggatttcttcatattctgctagagagaagaattctcagaatcttccttgtgttgtgtgtattcaactcacagagttgaacgatcctttacacagagcagacttgaaacactctttttgtggaatttgcaagtggagatttcagccgctttgaggtccatggtagaaaaggaaatatcttcgtataaaaactagacagaatgattctcagaaactcctttgtgatgtgtgtgttcaactcacagagtttaacctttcttttcatagagcagttaggaaacactctgtttgtaaagtctgcaagtggatattcagacctcgttgagaccttcgttggaaacgggatttcttcatattctgctagacagaagaattctcagtaacttccttgtgttgtgtttattcaactcacagaattgaatgatcctttacacagagcagacttgaaacactctttttgtggaatttgcaagtggagatttcagccgctttgtggtcaatggtagaaaaggaaatatcttcgtataaagactagacagaatcattctcagaaactgctgcgtgatgtgtgcgttcaactctcagagtttaacttttcttttcattcagcggtttggaaacactctgtttgtaaagtctgcacgtggaaattttgaccacttagaggccttcgttggaaacgggtttttttcatgtaaggctagacagaagaattcccagtaacttccttgtgttgtgtacattcaactcacagagttgaacgttcccttagacagagcagatttgaaacactctttttgtgcaattggcaagtggagatttcaagcgctttgaggtcaatggcagaaaaggaaatatcttcgtttcaaaactagacagaatcattcccacaaactgcgttgtgatgtgttcgttcaactcacagagtttaacctttctgttcatagagcagttaggaaacactctgtttgtaaagtctgcaagtggatattcagacctccttgaggccttcgttggaaacgggatttcttcatattctgctagacagaagtattctcagtaacttccttgtgttgtgtgtattcaactctcagagttgaacgatcctttacacagagcggacttgtaacactctttttgtggaatttgcaagtggagatttcagccgctttgaagtcaaagttagaaaaggaaataacttcctataaaaactagacagaatgattctcagaaactcctttgtgatgtgtgagttcaactcacagagtttaacctttcttttcatagagcagttaggaaacactctgtttctaaagtctgcaagtggatattcagacctctttgaggccttcgttggaaacgggtttttttcatataaggctagagagaagaaatcccagtaacttccttgtgttgtgtgtgttcaactcacagagatgaactctcatttacacagagcagatttgaaactctctttttgtggaatttgcaaatggagatttcaagcgctttgaggccaaaggcagaaaaggaaatatcttcgtataaaaactagacagaatcattctcagaaactgctgcgtgatgtgtgcgttcaactctcagagtttaacttttcttttcattcagcggtttggaaacactcagtttgtaaagtctgcacgtggatattttcaccacttagaggccttcgttggaaacgggttttttttcatgtaaggctagacagaagaattcccagtaacttccttgtgttgtgtacattcaactcacagagttgaacgttcccttagacagagcagatttgaaacactctttttctgcaattggcaagtggagatttcaagcgctttgaggtcaatggcagaaaaggaaatatcttcgtttcaaaactagacagaatcattcccacaaactgcgttgtgatgtgttccttcaactcacagagtttaacctttcttttcatagagcagttaggaaacagtctgtttgtcaattctgtaagtggatattctgacatcttgtggccttcgttggaaacgggatttcttcatattctgctagacagaagaattctcagtaactgccttgtgttgtgtgtattcaactcacagagttgaacgatcgtttacacagagcagacttgaaacactctttttgtggaatttgcaagtggagatttcagccgctttgaggtcaatggtagaataggaaatatcttcctatagaaactagacagaatgattctcagaaactcctttgtgatgtgtgcgttcaactcacagagtttaacctttcttttcatagagcagttaggaaacactctgtttgtaaaggctgcaagtggatattcagacatctttgaggccttcgttggaaaagggatttcttcatgttctgctagaaagaagaattcccagtaacttccttgtgttgtgtgtgttcaactcacagagttgaactttcatttacacagagcagattggaaacactctttttgtggaatttgcaaggggagatttcaagcgctttgaggccaaaggcagaaaaggaaatatcttcgtataaaaactagacagaatcattctcagaaactgctgcgtgatgtgtgcgttcaactctcagagtttaacttttcttttcattcagcagtttggaaacactctgtttgtaaagtctgcacgtggatattttgaccacttagaggccttcgttggaaacgggtttttttcatgtaaggctagacagaagaattcccagtaacttccttgtgttgtgtgcattcaactcacagagttgaacgttcccttagacagagcagatttgaaacactctatttgtgcaatttgcaagtgtagatttcaagctctttaaggtcaatggcagaaaaggaaatatcttcgtttcaaaactagacagaatgattctcagaaactcctttgtgatgtgtgcgttcaactcacagagtttaacctttcttttcatagagcagttaggaaacactctgtttgtaaagtctacaagtggatattcagacatctttgaggctttcgttggaaacgggatttcttcatattctgctggacagaagaattctcagaaacttcgttgtgttgtgtgttttcaaatcacagagttcaacgatcctttacacagagtagacttgaaacactctttttgtggaattggcagggtggagatttcagccgctttcaggtcaatggtagaaaaggaaatatcttcgtataaaaactagacagaatgattgtcagaaactcctttgtgatgtgtgcgttcaactcacagagtttaacctttcttttcatagagcagttaggaaacactctgtttgtaaagtctgcaagtggatattcagacctctttgaggccttcgttggaaacgggatttcttcatattctgctagacagaagaattcccagtaacttccatgtgttgtgtgtgttcaactcacagagttgaactttcatttacacagagcagatttgaaacactctttttgtggaatttgcaaatggagatttcaagcactttgaggccaaaggcagaaaaggaaatatcttcgtagaaaaactagacagaatcattctcagaaactgctctgcgatgtgtgcgttcaactctcagagtttaacttttcttttcattcagcagtttggaaacactctgtttgtaaagtctgcacgtggataacttgaccacttagaggtcttcgttggaaacgggtttttttcatgtaaggctagacagaagaattcccagtaacttccttgtgttgtgtacattcaactcacagagttgaacgttcccttagacagagcagatttgaaacactctttttgtgcaattggcaagtggtgatttcagccgctttgaggtcaatggtagaaaaggaaatatcttcgtataaaaactagacagaatcattcccacaaactgcgttctgatgtgttcgttcaactcacagagtttaacctttctgttcatagagcagttaggaaacactctgtttgtaaagtctgtaagtggatattctgacatcttgtggccttcgttggaaacgggatttcttcatattctgctagacagaagaattctcagtaacttccttgtgttgtgtgtattcaacacacagagttgaacgatgctttacacagagcagacttgaaacactctttttgtggaatttgcaagtggagatttcagccgctttgaggtcaatggtagaaaaggaaatatcttcgtataaagactagacagaatgattctcagaaactcctttgtgatgtgtgcgttcaactcacagagtttaacgtttcttttcatagagcagttaggaaacactctgtttgtaatgtctgcaagtggatattcagacccctttgaggccttcgttggaaacgggatttcttcatattatgctagacagaaagaattcccagtaacttccttgtgttgtgtgtgttcaactcacagagttgaactttgatttacacagagcagatttgaaacactctttttgtggaatttgcaagtggagatttcaagcgctttgaggccaaaggcagaaaaggaaatatcttcgtataaaaactagacagatcattctcagaaactgctctgcgatgtgtgcgttcaagtctcagagtttaacttttcttttcattcagcagtttggaaacactctgtttgtaaagtctgcacctggataatttgaccacttagaggccttcgttggaaacgggtttttttcctgtaaggctagacagaagaattcccagtaacttccttgcgttgtgtacattcaactcacagagttgaacgttcccttagacagagcagatttgaaacactctttttgtgcaattggcaagtggagatttcaagcgctttaaggtcaatggcagaaaaggaaatatcttcgtttcaaaactagacagaatgattctcagaaactcctttgtgatgtgtgcgttcaactcacagagtttaacctttcttttcatagagcagttaggaaacactctgattgtaaagtctgcaagtggatattcagaactccttgaggccttcgttggaaacgggatttcttcatattatgctagacagaataattctcagtaacttccttgtgttgtgtgtattcaactcacagagttgaacgatcctttacacagagcagacttgaaacactctatttgtagaatttgcaagtggagatttcagccgctttgaggtcaatagtagaataggaaatatcttcgtagaaaaactagacagaatgattctcagaaactcctttgtgatgtgtgcgttcaactcacagagtttaacatttcttttcatagagcagttaggaaacactctgtttgtaaagtctgcaagtggatattcagacctccttgaggccttcgttggaaacgggatttcttcatattatgctacacagaagaattctcagtaacttccttgtgttgtgtgtattcaactgacagagttgaactttcatttagagagagcagatttgaaacactgtttttgtggaatttgcaattggagatttcaagcgctttggggccaaaggcagaaaaggaaatatcttcgtataaaaactagacagaatgattctcagaaagtcctttgtgatgtgtgcgttcaactcacagagtttaacctttctgttcatagagctgttaggaaacactctgtttgtaaagtctgcacgtggaaattttgaccacttagaggccttcgttggaaacgggtttttttcatgtaaggctagacagaagaattcccagtaacttccttgtgttgtgtacattcaactcacaggagttgaacgttcccttagacagagcagatttgaaacactctttttgtgcaattggcaaatggagatttcaagcgctttaagttcaaaggcagaaaaggaaatatcttcgtttcaaaactagacagaatcattcccacaaactgcgttgtgatgtgttcgttcaactcacagagtttaacctttcttttcatagagcagttaggaaacagtctgtttgtcaattctgtaagtggatattctgacatcttgtggcattcgttggaaacgggatttcttcatattctgctagacagaagaattctcagaatcttccttgtgttgtgtgtattcaactcacagagttgaacgatcctttacacagagcagacttgaaacactctttttgtggaatttgcaagtggagatttcagccgctttgaggtccatggtagaaaaggaaatatcttcgtataaaaactagacggaatgattctcagaaactcctttgtgatgtgtgcgttcaactcacagagttaaacctttcttttcatagagcagttaggaaacactctgtttgtaaagtctgcaagtggatattcagacctccttgaggccttcgttggaaacgggatttcttcatattctgctagacagaagaattctcagtaacttccttttgttgtgtgtattcaactgacagagttgaactttcatttagacagagcagatttgaaacactctttttctggaatttgcaagtggagatttcaagcgctttgaggccaaaggcagaaaaggatatatcttcgtataaaaactagacggaatcattctcagaaactgctctgcgatgtatgcgttcaactctcagagtttaacttttcttttcattcagcagtttggaaacactctgtttgtaaattctgcacgtggatattttgaccacttagaggccttcgttggaaacgggtttttttcatgtaaggctagacagaagaattcccagtaacttccttgtgttgtgtgcattcaactcacagagttgaacgttcccttagaccgagcaggtttgaaacactctatttgtgcaatttgcaagtgtagttttcaagctctttaaggtcaacggcagaaaaggaaatatcttcgtttcaaaactagacagaatcattcccacaaactgcgttgtgatgtgttcgttcaactcacagagtttaacctttctgttcatagagcagttaggaaacactctgtgtgtaaagtctgcaagtggatattcagacctctttgaggccttcgttggaaacgggatttcttcatattctgctagacagaagaattctcagtaacttccttgtgttgtgtgtattcaactcatagagttgaacgatcctttacacagagcagacttgaaacactctatttgtagaatttgcaagtggagatttcagccgctttgaggtcaatagtagaaaaggaaatatcttcgtagaaaaactagacagaacgattctcagaaactcctttgtgatgtgtgcgttcaactcacagagtttaaactttcttttcatagagcagttaggaaacactctgtttgtaaagtctgcaagcggatattcagacctctttgaagccttcgttggaaacgggatttcttcatattatgctagacagaagaattcccagtaacttccttgtgttgtgtgtgttcaactcacagagttgaactttcatttacacagagcagatttgaaacactctttttgtggaatttgcaattggagatttcaagcgcttggaggccaaaggcagaaaaggaaatatcttcgtataaaaactagacagaatcattctcagaaactgctgcgtgatgtgtgcgttcaactctcagagtttaacttttcttttcattcagcggtttggaaacactctgtttgtaaagtctgcacgtgtatattttgaccacttagaggccttcgttggaaacgggttttttcatgtaaggctagacagaagaattcccagtaacttccttgtgttgtgtgcattcaactcacagagttgaacgttcccttagacagagcagatttgaaacactctatttgtgcaatttgcaagtgtagatttcaagcactttaaggtcaatggcagaaaaggaaatatcttcgtttcaaaactagacagaatgattctcagaaactcctttgtgatgtgtgcgttcaactcacagagtttaacctttcttttcatagagcagttaggaaacactctgttggtaaagtctgcaagtggatattcagacctctttgaggccttctttggaaacggaatttcttcatattctgctagacagaagaattctcagaaacttcctggtgttgcgtgttttcaactcacagagttcaacgatcctttacacagagtagacttgaaaaactctttttgttgaattggccagtggagatttcagccgctttgaggtcaatggtagaaaaggaaatatcttcgtataaaaactagacagaatcattctcagaaactcctttgtgatgtgtgtgcccaactcacagagtttaacctttcttttcatagagctgttaggaaacactctgtttgtaaagtctgcaagaggatattcagacctctttgaggccttcgttggaaacgggtttttttcatataaggctagacagaagaattctcagtaacttccttgtgttgtgtgtattcaactgacggagttgaactttcatttagagagagcagatttgtaacactgtttttgtggaatttgcaagtggagatttcatgcgctttggggccaaaggcagaaaaggaaatatcttcgtataaaaactagacagaatcattctcagaaactgctctgcgatgtgtgcgttcaactctcagagtttaacttttcttttaattcagcagtttggaaacactctgtttgtaaagtctgcacgtggatattttgaccacttagaggccttcgttggaaacgggtttttttcctgtaaggctagacagaagaattcccagtaacttccttgtgttgtgtgcattcaactcaaagagttgaacgttcccttagacagagcagatttgaaaaactctatttgtgcaatttgcaagtgtagatttcaagcgctttaaggtcaatggcagaaaaggaaatatcttcgtttcaaaactagacagaatcattcccacaaactgcgttgtgatgtgttcgttcaactcacagagtttaacctttctgttcatagagcagttaggaaacactctgtttgtaaagtctgtaagtggatattctgacatcttgtggccttcgttggaaaagggatttcatcatattctgctagacagaagaattctcagtaacttccatgtattgtgtgtattcaactcacagagttgaacgatcctttacacagagcagacttgaaacactctttttgtgaaatttgcaagtggagatttcagccgctttgtggtcaatggtagaataggaaatatcttcctatagaaactagacagaatgattctcagaaactcctttgtgatgtgtgcgttcaactcacagagtttaacctttcttttcatagagccgttaggaaacactctgtttgtaaagtctgcaagtggatattcagacctccttgaggccttcgttggaaacgggatttcttcatattatgctagacagaagaattcccagtaacttccttgtgttgtgtgtgttcaactcacagagttgaactttcatttagacagagcagatttgaaacactctttttgtggaatttgcaagtggagatttcaagcgctttgaggccaaaggcagaaaaggaaatatcttcgtataaaaactagacagaatcattctcagaaactgctctgcgatgtgtgcgttcaactctcagagtttaacttttcttttcattcagcagtttggaaacactctgtttgtaaagtctgcacgtggatattttgaccacttagaggccttagttggaaacggttttttttcctgtaaggctagacagaagaattcccagtaacttccttgtgttgtgtacattcaactcacagagttgaacgttcccttagacagagcagatttgaaacactctttttgtgcaattggcaaatggagatttcaagcgctttaaggtcaatggcaggaaaggaaatatcttcgtttcaaaactagacagaatcattcccacaaactgcgttgtgatgtgttcgttcaactcacagagtttaacctttcttttcatagagcagttaggaaacagtctgtttgtcaattctgtaagtggatattttgacatcttgtggccttcgttggaaacgggatttcttcatattctgctagacagaagaattctcagtaacttccttgtgttgtgtgtattcaactcacagagttgaaggatcctttacagagagcaggcttgaaacactctttttgtcgaatttgcaagtggagatttcagccgctttgaggtgaatggtagaataggaaatatcttcttatagaaactagacagaatgattctcagaaacttctttgtgatgtgtgccttcaactcacagagtttaacctttcttttcatagagcagttaggaaacactctgtttgtaaactctgcaagtggatattcagacctctttgaggccttcgttggaaacgggatttctccatactatgctagacagaagaattcccagtaacttccttgtgttgtgtgtgttcaactcacagagttgaactttcatttacacagagcagatttgaaacactctttttgtggaatttacaagtggagatttcaagcgctttgaggccaaaggcagaaaaggaaatatcttcgtataaaaactagacagaatcattctcagaaagtgctctgcgatgtgtgcgttcaactctcagagtttaactttgcttttcattcagcagtttggaaacactctgtttgtaaagtctgcacgtggataatttgaccacttagaggccttcgttggaaacgggtttttttcatgtaaggctagacagaagaattcccagtaacttccttgtgttgtgtgctttcaactcacagagttgaacgttcccttagacagagcagatttgaaacactctatttgtgcaatttgcaagtgtagatttcaagcgctttaaggtcaatggcagaaaaggaaatatcttcgtttcaaaactagacagaatcattcccacaaactgcgttgtgatgtgttccttcatctcacagagtttaacctttcttttcgtagagcagttaggaaacagtctgtttgtaaattctgtaagtggatattctgacatcttgtggccttcgttggaaacgggatttcttcatattctgctagacagaataattctcagtaacttccttgtgttgtgtgtattcaactgtcagagttgaacgatcctttacagagagcagacttgaaacactctttttgtggaatttgcaagtggagatttcagccgctttgaggtcaatggtagaataggaaatatcttcctatacaaactagacagaatgattctgagaaactcctttgtgatgtgggcgttcaactcacagagtttaacctttcttttcatagagcagttaggaaacacactgtttgtaaagtctgcaagtggatattcagacctccttgaggtcttcgttggaaacgggatttcttcatattatgctagacagaagaattctcagtaacttccttgtgttgtgtgtattcaactcagagagttgaacgatcctttacacagagcagagttgaaacactgtttttgtggaatttgcaagtggagatttcagccgctttgaggtcaatggtagaataggaaatttcttcctatagaaactagagagaatcattctcagaaactgctctgcgatgtgtgcgttcaactctcagagtttaacttttcttttcattcagcagtttggaaacactctgtttgtaaagtctgcaggtggatattttgaccactcagaggccttcgttggaaacgggtttttttcctgtaaggctagacagaagaattcccagtaacttccttgtgttgtgtacattcaactcacagagttgaacgttcccttagacagagcagatttgaaacactctttttgtgcaattggcaaatggagatttcaagcgctttaaggtcaatggcagaaaaggaaatatcttcgtttcaaaactagacagaatcattcccacaaactgcgttgtgatgtgttcgttcaactcacagagtttaacctttcttttcatagagcagttaggaaacagtctgtttgtcaattctgtaagtggatattctgacatcttgtggccttcgttggaaacggcatttcttcatattctgctagacagaagaattctcagtaacttccttgtgttgtgtgtattcaactcacaaagttgaacgatcctttacacagagcagacttgaaacactctttttgtggaatttgcaagtggagatttcagccgctttgagttcaatggtagaataggaaatatcttcctatagaaactagacagaatgattctcggaatctcctttgtaatgtgtgcgttcaactcacagagtttaacctttcttttcatagagcagttaggaaacactctgtttgtaaagtctgcaagtggatattcagacctcttttaggccttcgttggaaacgggatttcttcatattctgctagacagaagagttctcagtaacttctttgcgttgtgtgtattcaactgacagagttgaactttcatttagagagagcagatttgaaccactgtttttgtggaatttgcaagtggagatttcaagcgctttggggccaaaggcagaaaaggaaataaattcgtataaaaactagacataatcattctcagaaactgctctgcgatgtgtgcgttcaactctcagagtttaacttttcttttcattcagcagtttggaaacactctgtttgtaaagtctgcacgtggatattttgaccacttagaggccttcgttggaaatgggtttttttcctgtaaggctagacagaagaattcccagtaacttccttgtgttgtgtacattcaactcacagagttgaacattcccttagacagagcagatttgaaacactctttttgtgcaattggcaagtggagatttcaagagttttaaggtcaatggcagaaaaggaaatatcttggtttcaaaactagacagaatgattctcagaaactcctttgtgatgtgtgcgttcaactcacagagtttaacctttgtgttcatagagcagttaggaaacactctgtttgtaaagtctgcaagtggatattcagacctccttgaggccttctttggaaacgggatttcttcatattctgctagacagaagaattctcagtaacttccttgtgttgtgtgtattcaactcacagagttgaacgatcctttacagagagcagactttaaacactctttttgtggaatttgcaagtggagatttcagccgctttgaggtcaatggtacaaaaggaaatatcttcgtataaagactagacagaatgattctcagaaactcctttgtgatgtgtgcgttcaactcacagagtttaacttttcttttcatagagcagttaggaaacactctgtttgtaaagtctgcaggtggatattcagacctctttgaggccttcgttggaaacgggatttcttcatattatgctagacagaggaattctcagtaacttccttgtgttgtgtgtattcaactgacagagttgaactttcatttagagagagcagatttgaaacactgtttttgtggaatttgcaagtggagatttcaagcgctttggggacaaaggcagaaaaggaaatatctccgtataaaaactagacagaatgattctcagaaactcctttgtgatgtgtgtgttgaactcacagagtttaacctttcttttcatagagcagttaggaaacactctgtttgtaaagtctgcaagtggatattcagacctctttgaggccttcgttggaaacgggtttttttcatataagcctagacagaagaattcccagtaacttccttgtgttgtgtgtgttcaactcacagagttgaactttcatttacacagagcagatttgaaacactctttttgtgcaattggcaagtggagatttcaagcactttaaggtcaatggcagaaaaggaaatatcttcgtttcaaaactagacagaatcattcccacaaactgcgttgtgatgtgtccgttcatctcacagagtttaacctttcttttcatagagcagttaggaaacagtctgtttgtaaattctgtaagtggatattctgacatcttgtggccttcgttggaaacgggatttcttcatattctgctagacagaataattctcagtaacttccttgtgttgtgtgtattcaactcacagagttgaacgatcctttacagagagcagacttgaaacactctttttgtggaatttgcaagtggagatttcagccgctttgaggtcaacggtagaataggaaatatcttcctatagaaactagacagaatgattctcagaaaatcctttgtgatgtgtgcgttcaactcacagagtttaacttttcttttcatagagcagttaggaaacactctgtttgtaaagtctgcaagtggatattcagacctctttgaggccttcgttggaaacgggatttcttcatattatgcgagacagaagaattccctgtaacttccttgtgttgtgtgtgttcaactcacagagttgaactttcatttacacagagcagatttgaaacactctttttgtggaatttgcaaatggagatttcagccgcgttgaggtcaatggtagaaaaggaaatatcttcgtttcaaaactagacagaatcattctcagaaactgctctgcgatgtgtgcgttcaactctcagagtttaacttttcttttcattcagcagtgtggaaacactctgtttgtaaagtctgcacgtggatattttgaccacttagaggccttcgttggaaacgggtttttttcctgtaaggctagacagaagaattcccagtaacttccttgtgttgtgtacattcaactcacagagttgaaggttcccttagacagagcagacttgtaacactctttttgtggaatttgcaagtggagatttcagccgctttgaagtcaaaggtagaaaaggaaatatcttcctataaaaactagacagaatgattctcagaaactcctttgtgatgtgtgcgttcaactcacagagtttaacttttcttttcatagagcagttgggaaacactctgtttgtaaagtctgcaagtggatattcagacatccttgaggctttcgttggaaacgggatttcttcatatactgctagaaagaagaattctcagtaacttccttgtgttgtgtgttttcaactcacagagttgaacgatcctttacacagagcagacttgaaacactccttttgtggaatttgcaagtggagatttcagccgctttgaggtcaatggtagaataggaaatatcttcctatagaaactagacagaatgattgtcagaaactcctttgtgatgtgtgcgttcaactcacagaatttaacctttcttttcatagagaagttaggagacactgggttggtaaagtctaaaagtggatattcagacatctttgagggtttcgttggaaaagggatttattcatattctgctagacagaagaattcccagtaacttccttgtgttgtgtgtgttcatctcacagagttgaactttcatttacacagagcagatttgaaacactctttttgtggaatttgcaaatggagatttcaagcgctttgaggccaaaggcagaaaaggaaatatcttcgtataaaaactagacagaatcattctcagaaactgctctgcgatgtgtgcgttcaactctcagagtttaacttttcttttcattcagcagtttggaaacactctggttgtaaagtctgcacgtggataacttgaccacttagaggccttcgttggaaacgggtttttttcctgtaaggctagacagaagaattctcagtaacttccttgtgttgtgtgtattcaactcacagagttgaacgatcctttacacagagcagacttgaaacactctttttgtggaatttgcaagtggagatttcagccgctttgaggtcaatggtagaaaaggaaactatcgtcgtataaagactagacagaatgattctcagaaaatgctttgtgatgtgtgcgttcaactcacagagtttaacttttcttttcatagagcagttaggaaacactctgtttgtaaagtctgcaagtggatattcagacctctttgaggccttctttggaaacgggatttctacatattctgctagacagaagaattctcagtaacttccttgtgttctgtgtattcaactcacagagttgaatgatcctttacagagagcagacttgaaacactctttttgtggaatttgcaagtggagatttcagccgctttgaggtcaatggtagaataggaaatatcttcgaagaaaaactagacagaatgattctcagaaactcctttgtgatgtgtgtgttcaactcacagagtttaacctttgttttcatagagcagttagtaaacactctgtttataaagtctgcaagtggatattcagacccctttgaggccttcgttggaaacgggatttcttcatattatgctagacagaagaattctcagtaacttccttttgttgtgtgtattcaactgacagagttgaactttcatttagagagagcagatttgaaacactgtttttgtggaatttgcaagtggagatttcaagcgctttggggccaaaggcagaaaaggaaatatcttcgtataaaaactagacagaatcattctcagaaactgctctgtgatgtgtgcgttcaactctcagagtttaacttttcttttcattcagcagtttggaaacactctgtttgtaaagtctgcacgtggatattttgaccacttagaggccttcgttggaaacgggtttttttttcacgtaaggctagacagaagaattcccagtaacttccttgtgttgtgtacattcaactcacagagttgaaagttcccttagacagagcagacttgtaacactctttttgtggaatttgcaagtggagatttcagccgctttgaagtcaaaggtagaaaaggaaatatcttcctataaaaactagacagaatcattcccacaaactgcgttgcgatgtgttcgttcaactcacagagtttaacatttcttttcatagagcacttaggaaacagtctgtttgtaaattctgtaagtggatattctgacatcttgtggccttcgttggaaacgggatttcttcatattctgctagacagaagaattctcggaaacttccttgtgttgtgtgtattcaactcacagagttgaacgatcctttacacagagcagactggaaacactctttttgtgaaatttgcaagtggagatttcagccgctttaaggtcaatggtaaaataggaaatatcttcctatagaaactagacagaatgattctcagaaacccctttgtgatgtgtacgttcaactcacagagtttaacctttcttttcatagagcagttaggaaacactctgtttgtaaagtctgcaagtggatattcagacctccttgaggccttcgttggaaactgcatttcttcatattatgctagacagaagaattctcagtaacttccttgtgttgtgtgtattcaactgacagagttgaactttcatttagagagagcagatttgaaatactgtttttgtggaatttgcaagtggagatttcaaacgctttggggccaaaggcagaaaaggaaatatcttcgtataaaaactagacagaatcattctcagaaactgctgcgtgatgtgtgcgttcaactctcagagtttaacttttcttttcattcagcggtttggaaacactctgtttgtaaagtctgcacgtggatattttgaccacttagaggccttcgttggaaacgggttttcttcatgtaaggctagacagaagaattcccagtaacttaccttgtgttgtgtacattcaactcacagagttgaacgttcccttagacagagcagatttgaaacactctttttgtgcaattggcaagtggagatttcaagcgctttaaggtcaatggcagaaaaggaaatatcttcgtttcaaaactagacagaatcattcccacaaactgcgttgtaatgtgttcgttcaactcacagagtttaacctttctgttcatagagcagttaggaaacactctgtttgtaaagtctgtaagtggatattctgacatcttgtggccttcgttggaaacgggatttcttcatattctgctagacagaagaattctcagtaacttccttgtgttgtgtgtattcaactcacagagttgaacgatcctttacacagagcagacttgaaacactctttttgtggaatttgcaagtggagatttcagccgctttgaggtcaatggtataataggaaatatcttcctatagaaactagacagaatgattgtcagaaactccttggtgctgtgtgcgttcaactcacagagtttaaactttcttttcatagagcagttaggaaacactctgtttgtaaagtctgcaggtggattttcagacatcattgaggctttcgttggaaacgggatttcttcatattctgctagacagaagaattcccagtaacttccttgtgttgtgtgtgttcaactcacagagttgaactttcatttacacagagcagatttgaaacactctttttgtggaatttgcaaatggagatttcaagggctttgaggccaaaggcagaaaaggaaatgtcttcgtttcaaaactagacagaatcattctcagaaactgcttctggcgatgtgtgcgttcaactctcagagtttaacttttcttttcattcagcagtttggaaacactctgtttgtaaagtctgcacgtggatattttgacgacttagaggccttcgttggaaacgggtttttttcctgtaaggctagacagaagaattcccagtaacttccttgtgttgtgtacattcaactcacagagttgaacgttcccttagacagagcagatttgaaacactctttttgtgcaattggcaaatggagatttcaagcgctttaagttcaatggcagaaaaggaaatatcttcgtttcaaaactggacagaatcattcccacaaactgcgttgtgatgtgttcgttcaactcacagagtttaacctttcttttcatagagcagttaggaaacagtctgtttgaaaattctgtaagtggatattctgacatcttgtggccttcgttggaaacgggatttcttcatattctgctagacagaagaattctcagtaacttccttgtgttgtgtgtattcaactcacagagttgaacgatcctttacacagagcagacttgaaacactctttttgcggaatttgtaagtggagatttcagccgctttgaggtcaatggtagaaaaggaattatcttcgtataaaaactagacagaatcattctcagaaactcctttgtgatgtgtgcgttcaactcacagagtttaacctttcttttcatagagcagttaggaaacactctgtttgtaaagtctgcaagtggatattcagacctccttgaggccttcgttggaaacgggatttcttcatattatgctagacagaataattctcagtaacttccttgtgttgtgtgtattcaactcacagagttgaaggatcctttacagagagcaggcttgaaacactctttttgtggaatttgcaagtggagatttcagccgctttgaggtcaatggtagaataggaaatatcttcttatacaaactagacagaatcattctcagaaactgctgtgtgatgtgtgcgttcaactctcagagtttaacttttcttttcattcagcggtttggaaacactctgtttgtaaagtctgcacgtggatattttgaccacttagaggccttcgttggaaacgggtttttttcatgtaaggctagacagaagaattcccagtaacttccttgtgttgtgtacattcaactcacagtgttgaacgttcccttagacagagcagatttgaaacactctttttgtgcaactggcaagtggagatttcaagcgctttaaggtccatggcagaaaaggaaatatcttcgtttcaaaactagacagaatcattcccacaaactgcgttgtgatgtgttcgttcaactcacagagtttaacctttcttttcatagagcagttaggaaacactctgttggtaaattctgtaagtggatattctgacatcttgtggccttcgttggaaacgggatttctacatattctgccagacagaataattctcattaacttccttgtgttgtgtgtattccactcacagagttgaacgatcctttacagagagcagacttgaaacactctttttgtggaatttgcaagtggagatttcagccgctttgaggtcaatggtagaataggaaatatcttcctatggaaactagacagaatgattctcagaaactcctttgtgatgtgtgtgttcaactcacagagtttaacctttcttttcatagagcagttagtaaaaagtctgtttataaagtctgcaggtggatattcagacccctttgaggccttcgttggaaacgggatttcttcatattatgctagacagaagaattcccagtaacttccttgtgttgtgtgtgttcaactcacagagttgaactttgatttacacagagcagatttgaaacactctttttgtggaatttgcaagtggagatttcaagcgctttgaggccaaaggcagaaaaggaaatatcttcgtttcaaaactagacagaatcattctcagaaactgctgcgtgatgtgtgcgttcaactctcagagtttaacttttcttttcattcagcggtttggaaacactctgtgtgtaaagtctgcacgtggatattttgaccacttagagaccttcgttggaaacgggattttttcatgtaaggctagacagaagaattcccagtaacttccttgtgttgtgtgcattcaactcacagagttgaacgttcccttagacagagcagatttgaaacactctatttgagcaatttgcaagtgtagatttcaagcgctttaaggtcaatggcagaaaaggtaatatcttcgtttcaaaactagacagaatcattcccacaaactgcgttgtgatgtgttcgttcaactcacagagtttaacctttctgttcatagagcagttaggaaacactctgtttgtaaagtctgtaagtggatattctgacatcatgtggccttcgttggaaacgggatttcttcatattctgctagacagaagaattctcagaaacttccttgtgttgtgtgttttcaactcacagagttgaacgatcctttacacagagcagactggaaacactccttttgtggaatttgcaagtggagatttcagccgctttgaggtcaatggtagaataggaaatatcttcctatagaaagtagacagaatgattctcagaaactcctttgtgatgtgtacgttcaactcacagagtttaacctttcttttcatagagcagttgggaaacactctgtttgtaaagtctgcaagtggatattccgacatccttgaggctttcgttggaaacgggatttcttcatattctgctagaaagaagaattctcagtaacttccttgtgttgtgtgtattcaactcacagagttgaacgatcctttacacagagcagacttgaaacactctttttgtggaatttgcaagtggagatttcagccgctttgaggtcaatggtagaataggaaatatcttcctatagaaactagacataatcattctcagaaactgctgcgtgatgtgtgccttcaactctcagagtttaacttttcttttcattcagcggtttggaaacactctgtttgtaaagtctgcacgtggatattttgaccacttagaggccttcgttggaaacgggtttttttcatgtaaggctagacagaagaattcccagtaacttccttgtgttgtgtgcattcaactcacagagttgaacgttcccttagacagagcagatttgaaacactctatttgtgcaatttgcaagtgtagatttcaagcgctttaaggtcaatggcagaaaaggaaatatcttcgtttcaaaactagacagaatgattctcagaaactcctttgtgatgtgtgcgttcaactcacagagtttaacgtttcttttcatagagcagttaggaaacactctgtttgtaaagtctgcaagtggatattcagacatctttgaggctttcgttggaaacgggatttcttcatattctgctagaaagaagaattctcagtaacttccttgtgttgtgtgtattcaactcacagagttgaatgatcctttacacagaacagtcttgaaacactctttttgtggaatttgcaagtggagatttcagccgctttgaggtcaatggtagaataggaaatatcttcctatagaaactagacagaatgattctcagaaactcctttgtgatgtgtgcgttcaactcacagagttcaacctttcttttcatagagcagttggaaaacactctgtttgtaaagtctgcaagtggatattcaaacttctttgaggccttcgttggaagcgggatttcttcatattctgctagacagaaggattcctagtaacttccttgtgttgtgtgtgttcaactcacagagttgaactttcatttacaaagagcagatttgaaacactctttttgtggaatttgcaagtggagatttcaagcgctttgaggccaaaggcagaaaaggaaatatcttcgtataaaaactagacagaatcattctcagaaactgctgcgtgatgtgtgcgttcaactctcagagtttaacttttcttttcattcagcggtttggaaacactctgtttgtaaagtctgcacgtggatgttttgaccacttagaggccttcgttagaaactggtttttttcatgtaaggctagacagaagaattcacagtaacttccttgtgttgtgtgcattcaactcacatagttgaacgttcccttagacagagcagatttgaaacactctatttgtgcaattcgcaagtgtagatttcaagcgctttaaggtcaatggcagaaaaggaaatatcttcgtttcaaaactagacagaatcattctcacaaactgcgttgtgatgtgttcgttcaactcacagagattaacctttctgttcatagagcagtgaggaaacactctgtttgtaaagtctgtaagtggatattctgacatcttgtggccttcgttggaaacgggatttcttcatattctgctagacagaagaattctcagtaacttccttgtgttgtgtgtattcaactcacagagttgaacgatcctttacacagagcagacttgaaacactctttttgcggaatttgcaagtggagatttcagccgctttgaggtcaatggtagaataggaaatatcgtcctatagaaactagacagaaatgattctcagaaactcctttgtgatgtgtgtgttcaactcacagagtttaacatttcttttcatagagcagttaggaaacactctgtttgtaaagtctgcaagtggatattcagacctctttgaggccttcgttggaaacgggtttttttcatataaggctagacagaagaattcccagtaacttccttgtgttgtgtgtgttcaactcacagagttgaactttcatttacacagagcagatttgaaacactctttttgtggaatttacaaatggagatttcaagcgctttgaggccaaaggcagaaaaggaaatatctacgtataaaaactagacagaatcattctcagaaactgctgcgtgatgtgtgcgttcaactctcagagtttaacttttctttacattcagcggtttggaaacactctgtttgtaaagtctgcacgtggatattttgaccacttagaggccttcgatggaaacgggattttttcatgtaaggctagacagaagaattcccagtaacttccttgtgttgtgtgcattcaactcacagagttgaacgttcccttagacagagcagatttgaaacactctatttgtgcaatttgcaagtgtagatttcaagcgctttaaggtcaacggcagaaaaggaaatatcttcgtttcaaaactagacagaatcattcccacaaactgcgttgtgatgtgttcgttcaactcacagagtttaacctttcttttcatagagcagttaggaaacagtctgtttgaaaattctgtaagtggatattctgacatcttgtggccttcgttggaaacgggatttcttcatattctgctagacagaagaattctcagtaacttccttgtgttgtgtgtattcaactcacagagttgaacgatcctttacagagagcagacttgaaacactctttttgtggaatttgcaagtggagatttcagccgctttgaggtcaatggcagaaaaggaaatatcttcgtataaagactagacagaatgattctcagaaactcctttgtgatgtgtgcgttcaacacacagagtttaacttttcttttcatagagcagttaggaaacactctgtttgtaaagtctgcaagtggatattcagacctctttgaggccttcgttggaaacgggatttcttcatattatgctagacagaataattctccgtaacttccttgtgttgtgtgtattcaactcacagagttgaacgatcctttacagagagcagacttgaaacactctttttgtggaatttgcaagtggagatttcagccgctttgaggtcaatggtagaatgggaaatatcttcctatagaaactagacagaatctttctcagaaactgctctgcgatgtgtgcgttcacctctcagagtttaacttttcttttcattcagcagtttggaaacactctgtttgtaaagtctgcacgtggatattttgaccacttagagtccttcgttggaaacgggtttttttcatgtaaggctagacagaagaattcccagtaacttccttgtgttgtgtgcattcaactcacagagatgaacgttcccttagacagagcagatgtgaaacactctatttgtgcaatttgcaagtgtagatttcaagcactttaaggtcaatggcataaaaggaaatatcttcgtttcaaaactagacagaatcattcccacaaactgcgttgtgatgtgttcgttcaactcacagagtttaacctttcttttcatagagcagttaggaaacagtctgtttgtcaattctgtaagtggatattctgacatcttgtggccttctttggaaacgggatttcttcatattctcctagacagaagaattctcagaatcttccttgtgttgtgtgtattcaactcacacagttgaacgatggtttacacagagcagatttgacacactctttttgtggaatttgcaattggaaatttcagccgctttgaggtcaatggtagaaaaggaaatatcttcgtataaaaactagacagaatgattctcagaaactcctttgtgatgtgtgcgttcaactcaaagagtttaacttttcttttcatagagcagttaggaaacactctgtttgtaaagtctgcaagtggatattcagacctctttgaggccttcgttggaaacgggatttcttcatattatgctagacagaagaattctcagtaacttccttgtgttgtgtgtagtcaactcacagagttgaacgatcctttacacagagcagacttgaaacattctttttgtggaatttgcaagtggagatttcagccgctttgaggtcaatagtagaaaaggaaatatcttcgtagaaaaactagacagaatcattctcagaaactgctctgcgatgtgtgcattcaactctcagagtttaatttttcttttcattcagcagtttggaaacattctctttgtaaagtctgcacgtggatattttgaccacttagaggccttcgttggaaacgggttttattcttgtaaggctagacagaagaattcccagtaacttccttgtgttgtgtacattcaactcacagagttgaacgttcccttagacagagcagatttgaaacactctttttgtgcaattggcaagtggagatttcaagcgctttgaggtcaatggcagaaaaggaaatatcttcctttcaaaactagacagaatcattcccacaaactgcgttgtgatgtgttcgttcaactcacagagtttaacctttctgttcatagagcagttaggaaacactctgtttgtaaagtctgtaagtggatattctgatatcttgtggccttcgttggaaacgggatttcttcatattctgctagacagaagaattctcagaatcttccttgtgttgtgtgtattcaactcacagaggtgaacgatcctttacacagagcagacttgaaacactctttttgtggaatttgcaagtggagatttcagccgctttgaggtccatggtagaaaaggaaatatcttcgtataaaaactagacagaatgattctcagaaacttcattgtgacgtgtgcgttcaactcacagagtttaacctttcttttcatagagcagttaggaaacactctgtttgtaaagtctgcaagtggatattcggacctctttgaggccttcgttggaaacgggatttcttcatactgtgctagacagaagaattctcagtaacttccttttgttgtgtgtattcaactgacagagttgaactttcatttagagagagcagatttgaaacactgtttttgtgcaatttgcaagtggagatttcaagcgctttggggccaaaggcagaaaaggaaatatcttcgtataaaaactagacagaatcattctcagaaactgctgcgtgatgtgtgcgttcaactctcagagtttaacttttcttttcattcagcggtttggaaacactctgtttgtaaagtctgcacgtggatattttgaccacttagaggccttcgttggaaacggttttttttcatgtaaggctagacagaagaattcccagtaacttccttgtgttgtgtgcattcaactcacagagttgaacgttcccttagacagagcagatttgaaacactctatttgtgcaatttgcaagtgtagatttgaagcgctttaaggtcaatggcagaaaaggaaatatcttcgtttcaaaactagacagaatcattcccacaaactgcattgtgatgtgttcgttcaactcacagagtttaacctttctgttcatagagcagttaggaaacactctgtttgtaaagtctgcaagtggatattcagacctccttgaggccttcgttggaaacgggatttcttcatattctgctagacagaagaattctcagtaacttccttgtgttgtgtgtattcaactcacagagttgaacgatcctttacacagagcagacttgaaacactctatttgtagaatttgcaagtggagatttcagccgctttgaggtcaatagtagaaaaggaaatatcttcgtagaaaaactagacagaatgattctcagaaactcctttgtgatgtgtgtgttcaactcacagagtttaacctttcttttcctagagcagttagtaaacactctgtttataaagtctgcaagtggatattcagacccctttgaggccttcgttggaaacgggatttcttcatattatgctagacagaagaattctcagtaacttccttgtgttgtgtgtattcaactgacagagttgtactttcatttagagagagcagatttgaaacactgtttttgtggaatttgcaagtggagatttcaagcgctttggggccaaaggcagaaaaggaaatatcttcgtataaaaactagacagaatgattctgagaaactcctttgtgatgtgtgcgttcaactcaccgagtttaacctttcttttcacagagcagttaggaaacactctgtttgtaaagtctgcaagtggatattcagacctccttgaggccttcgttggaaacgggatttcttcatattatgctagacagaagaattctcagtaacttccttgtgttgtgtgtattcaactcacagagttgaacgatcctttacacagagcagacttgaaacactctttttgtgaaatttgcaagtggagattccagccgctttgtggtcaatggtagaataggaaatatcttcctatagaaactagacagaatgattctgagaaactcctttgtgatgtgtgcgttcaactcacagagtttaacctttcttttcatagagcagttaggaaacactctgtttgtaaagtctgcaagtggatattcagacctccttgaagccttcgttggaaacgggatttcttcatattatgctagacagaagaattctcagtaacttccttgtgttttgtgtattcaactcacagagttgaacgatcctttacacagagcagacttgaaacactctttttgtggaatttgcaagtggagatttcagccgctttgagttcaatggtagaataggaaatatcttcctatagaaactagacagaattattctgagaaactcctttgtgatgtgtgcgttcaactcacagagtttaacctttcttttcatagagcagttaggaaacactctgtttgtaaagtctgcaagtggatattcagacctccttgaggccttcgttggaaacgggatttcttcatattatgctagacagaagaattcccagtaacttccttgtgttgtgtgtgatcaactcacagagttgaactttcatttacacagagcagatttgaaacactctttttgtggaatttgcaggtggagatttcaagcgctttgaggccaaaggcagtaaaggaaatatcttcgtataaaaactagacagaatcattctcagaaactgctctgcgatgtgtgcgttcaactctcagagtttaacttttcttttcattcagcagtttggaaacactctgtttgtaaagtctgcatgtggataacttgaccacttagaggacttcgttggaaacgggtttttttcctgtaaggctagacagaagaattcccagaaacttccttgtgttgtgtacattcaactcacagagttgaacgttcccttagacagagcagatttgaaacactctttttgtgcaattggcaagtggtgatttcagccgctttgaggtcaatggtagaaaagggaatatcttcgtataaaaactagacagaatcattcccacaaactgcgttgtgatgtgttcgttcaactcacagagtttaacctttctgttcatagagcagttaggaaacactctgtttgtaaagtctgtaagtagatattctgacatattgtggccttcgttggaaacgggatttcttcatattatgctagacagaagaattctcagtaacttccttgtgttgtgtgtattcaactcacagagttgaacggtcctttacagagagcagacttgaaacactctttttgtggaatttgcaagtggagatttcagccgctttgaggtcaatggtaaaataggaaatatcttcgtatagaaactagacagaatgattctcagaaactcctttgtgatgtgtgtgttcaactcacagagtttaacctttcttttcatagagcagttaggaaacactctgtttataaagtctgcaagtggatattcagacccctttgtggccttcgttggaaacgggatttcttcatattatgctagacagaagaattctcagtaacttccttgtgttgtgtgtattcaactgacagaattgaactttcatttagagagagcagatttgaaacactgtttttgtggtatttgcaagtggagatttcaagcgctttggggccaaaggcagaaaaggaaatatcttcgtataaaaactagacagaatcattctcagaaactgctgcgtgatgtgtgcgttcaactctcagagtttaacttttcttttcattcagcggtttggaaacactctgtttgtaaagtctgcacgtggaaattttgaccacttagaggccttcgttggaaacgggattttttcatgtaaggctagacagaagaattcccagtaacttccttgtgttgtgtacgttcaactcacagagttgaacgttcccttagacagagcagatttgaaacactctttttgtgcaattggcaagtggagatttcaagcgctttaagttcaatggcagaaaaggaaatatcttcgtttcaaaactagacagaacgattctaagaaactcctttgtgatgtgtgcgtacaactcacagagtttaacctttcttttcatagagcagttaggaaacactctgtttgtaaagtctgcaagtggatattcagacctctttgagtccttcgttggaaacgggatttcttcatattctgctagacagaagaattctcagtaacttccttgtgttgtgtgtattcaactcacagagttgtacgatcctttacacagagcagacttgaaacactctttttgtggaatttgcaagtggagatttcagccgctttgaggtcaatagtagaaaaggaaatatcttcgtagaaaaactagacagaatgattctcataaactcctttgtgatgtgtgagttcaaatcacagagtttaacttttcttttcatagatcagttaggaaacactctgtttctaaagtctgcaagtggatattcagatctctttgaggccttcgttggaaacgggatttcttcatattatgctagacagaagaattcccagtaacttccttgtgttgtgtgtgttcaactcacagagttgaactttcatttacacagagcagatttgaaacactctttttgtggaatttgcaaacggagatttcaagcgctttgaggccaaaggcagaaaaggaaatatcttcgtttcaaaactagacagaatcattctcagaaactgctctgcgatgtgtgcgttcaactctcagagtttaacttttcttttcattcagcagtttggaaacactctgtttgtaaagtctgcacgtggatattttgaccacttagaggccttctttggaaacgggttttttcctgtaaggctagacagaagaattcccagtaacttccttgtgttgtgtacattcaactcacagagttgaacgttcccttagacagagcagatttgaaacactctttttgtgcaattggcaagtgcaaatttcaagcgctttaaggtcaatggcagaaaaggaaatatcttcgtttcaaaactacacagaatcattcccacaaactgcgttgtgatgtgttcgttcaactcacagagtttaacctttccgttcatagagcagttaggaaacactctgtttgtaaagtctgtaagaggatattctgacatcttgtggccttcgttggaaacgggatttcttcatattctgctagacagaagaattctcagtaacttccttgtgttgtgtgtattcaactcacagagttgaacgatcctttacacagagcagacttgaaacactctttttgcggaatttgcaagtggagatttcagccgctttgaggtcaatggtagaataggaaatatcttcctgtagaaactagacagaacgattctcagaaactcctttgtgatgtgtgcgttcaactcacagagtttaacttttcttttcatagagccgttaggaaacactctgtttgtaaagtctgcaagtggatattcagacctctttgaggccttcgttagaaacgggatttcttcctattctgctagacagaagaattctcagtaactgccttgtgttgtgtgtatacaactcacagagttgaacgatcctttacacacagcagacttgaaacactctttttgtggaatttgcaagtggagatttcagccgctttgaggtcaatggtagaataggaaatatcttcctatagaaactagacagaatcattctcagaaactgctctgcgatgtgtgcgttgaactctcagagtttaacttttcttttcattcagcaatttggaaacactctgtttgtaaagtctgcacgtggatattttgaccacttagaggccttcgttggaaacgggtttttttcctgtaaggctagacagaagaattcccagtaacttccttgtgttgtgtacattcaactcacagagttgaacgttcccttagacagagcagatttgaaacactctttttgtgcaattggcaaatggagatttcaagcgctttaagttcaatggcagaaaaggaaatatcttcgtttcaaaactagacagaatcattctcagaaactgctctgcgatgtgtgcgttcaactctcagagtttaacttttcttttcattcagcagtttggaaacactctgtttgtaaagtctgcacgtggataatttgaccacttagaggctttcgttggaaacgggtttttttcatgtaaggctagacagaagagttctcagtaacttccttgtgttgtgtgtattcaactcacagagttgaacgatcctttacacagagcagacttggaacactctttttgtggaatttgcaagtggagatttcagccgcgttgaggtcaatggtagaaaaggaaatatcttcgtataaaaactagacagaatgattctcagaaactcctttgtgatgtgtgtgttcaactcacagagtttaacctttcttttcatagagcagttaggaaacactctgtttataaagtctgcaagtggatattcagacctccttgaggccttcgttggaaacgggatttcttcatattctgctagacagaagaattcccagtaactcccttgtgttgtgtgtgttcaactcacagagttgaactttcatttacacagagcagatttgaaacactctttttgtggaatttgcaagtggagatttcaagcgctttgaggccaaaggcagaaaaggaaatatcttcgtataaaaactacacagaattattctcagaaactgctgcgtgatgtgtgcgttcaactctcagagtttaacttttcttttcattcagcggtttggaaacactctgtttgtaaagtctgcacgtggatattttgaccacttagaggccttcgttggaaacgggttttttttcatgtaaggctagacagaagaattcccagtaacttccttgtgttgtgtacattcaactcacagagttgaacgttcccttagacagagcagatttgaaacactctttttgtgcaattggcaaatggagatttcaagcgctttaaggtcaatggcagaaaaggaaatatcttcgtttcaaaactagacagaatcattcccacaaactgcgttgtgatgtgttcgttcaactcacagagtttaacctttctgttcatagagcagttaggaaacactctgtttgtaaagtctgtaagtggatattctgacatcttgtggccttcgttggaaacgggatttcttcatattctgctggacagaagaattcccagtaacttccttgtgttgtgagtgttcaactcacagagttgaaatttcatttacacagagcagatttgaaacactctttttgtggaatttgcaagtggagatttcagccgctttgaggtccttggtagaaaaggaaatatcttcgtataaaaactagacagaatgattctcagaaactcctttgtgatgtgtgtgttcaactcacagagtttaacctttcttttcatagagaagttagtaaacactctgtttataaagtctgcaagtggatattcagacccctttggggccttcgttggaaacgggatttcttcatattatgctagacagaagaattctcagaatcttccttgtgttgtgtgtattcaactcacacagttgaacgattgtttacacagagcagatttgaaacactctttttgtggaatttgcaagtggagatttcaagcgctttgaggccaaaggcagaaaaggaaatatcttcgtataaaaactagacagaatcattctcagaaactgctctgcgatgtgtgcattcaactctcagagtttaacttttcttttcattcagcagtttggaaacactctgtttgtaaagtctgcacgtggatattttgaccatttagaggccttcgttggaaacgggtttttttcttgtaaggctagacagaagaattcccagtaacttccttgtgttgtgtgcattcaactcacagagttgaacgttcccttagacagagcagatttgaaacactctatttgtgcaatttgcaagtgtggatttcaagcgctttaaggtcaacggcagaaaaggaaatatcttcgtttcaaaactagacagaatcattcccacaaactgcgttgtgatgtgttcgttcaactcacagagtttaacctttctgttcatagagcagttaggaaacactctgtttgtaaagtctgtaagtggatattctgacatcttgtggccttcgttggaaacgggatttcttcctattctgctagacagaagaattctcagaaacttcccttgtgttgtgtgttttcaactcacagagttgaacgatcctttacacagagcagacttgaaacactccttttgtggaatttgcaagtggagatttcagccgctttgaggtcaatggtagaataggaaatatcttcctatagaaactagacagaatgattctcagaaacttctttgtgatgtgtgcgttcaactcacagactttaacttttcttttcatagagcagttagtaaacactctgtttgtaaagtctgcaagtggatattcagacctctttgaggccttcgttggaaacgggatttcttcatattctgctagacagaagaattctcagtaacttccttgtgttgtgtgtattcaactgacagagttgaactttcatttagagagagcagatttgaaacactgtttttgtggaatttgcaagtggagatttcaagcgctttggggccaaaggcagaaaaggaaatatcttcgtataaaagctagacagaatcattctcagaaactgctgcgtgatgtgtgcgttcaactcacagagtttaagttttcttttcattcagcggtttggaaacactctgtttgtaaagtctgcacgtggatattttgaccacttagaggccttcgttggaaacgggtttttatcatgtaaggctagacagaagaattcccagtaactttccttgtgttgtgtgcaatcaaatcacagagttgaacgttcccttagacagagtagatttgaaacactctatttgtgcaatttgcaagtgtagatttcaagcgctttaaggtcaaaggcagaaaaggaaatatcttcgtttcaaaactagacagaatcattcccacaaactgcgttgtgatgtgttcgttcaactcacagagtttaacctttctgttcatagagcagttaggaatcactctgtttgtaaagtctgtaagtggatattctgacatcttgtggccttcgtttgaaaagggatttcttcatattctgctagacagaagaattcccagaaacttcgttgtgttgtgtgttttcaactcacagagttcaacgatcctttacacagagtagacttgaaacactctttttgtggaattggcagggtggagatttcagccgctttgaggtcaatggtagaaaaggaaatatcttcgtataaaaactagacagagtgattctcagaaactcctttgtgatgtgtgcgttcaactcacagagttaaacctttcttttcatagagcagttaggaaacactctgtttgtaaagtctgcaagtgggtattcagacatccttgaggctttcgttggaaacgggatttcttcatattctgctagaaagaaggattcccagtaacttccttgtgttgtgtgtgttcaactcacagagttgaactttcatttacaaagagcagatttgaaacactctttttgtggaatttgcaattggagatttcaagcgctttgagaccaaaggcagaaaaggaaatatcttcgtataaaaactagacagaatcattctcagaaactgctctgcgatgtgtgcgttcaactctcagagtttaacttttcttttcattcagcagtttggaaacactctgtttgtaaagtctgcacgtggatattttgaccacttacaggccttcgttggaaacgggtttttttcatgtaaggctagacagaagaattcccagtaacttccttgcgttgtgtgcattcaactcacagagttgaacgttcccttagacagagcagatttgaaacactgtttttgtgcaatttgcaagtggagatttcaagtgctttaaggtcaatggcagaaaaggaaatatcttcgtttcaaaactagacagaatcattcccacaaactgcgttgtgatgtgttcgttcaactcacagatttaaacttttcttttcatagagcagttaggaaacactctgtttgtaaagtctgtaagtggatattctgacatcttgtggccttattggaaacgggatttcttcatattctgctagacagaagaattctcagtaacttccttgtgttgtgaggattcaactcacagagttgaacgatcctttacacagagcagacttgaaacactctttttgtggaatttgcaagtggagatttcagccgctttgaggtcaatggtagaaaaggaaactatcttcatataaagactagacagaatgattctcagaaactcctttgtgatgtgtgtgttcaactcacagagtttaacctttcttttcatagagcagttagtaaacactctgtttataaagtctgcaagtggatattcagaccccttggaggccttcgttggaaacgggatttcttcatattatgctagacagaagaattctcagtaacttccttgtgttgtgtgtattcaactgacagagttgaactttcatttagagagagcagatttgaaacactgtttttgtggaatttgcaattggagatttcaagcgctttggggccaaaggcagaaaaggaaatatcttcgtataaaaactagacagaatcattctcagaaactgctctgcgatgtgtgcgttcaactctcagagtttaatttttcttttcattcagcagtttggaaacactctgtttgtaaagtctgcacgtggataatttgaccacttagaggccttcgttggaaacgggtttttttcatgtaaggctagacagaagaattctcagtaacttccttgtgttgtgtgtattcaactcacagagttgaacgatcctttacacagagcagacttgtaacactctttttgtggaatttgcaagtggagatttcagcctctttgaagtcaaaggtagaaaaggaaatatcttcctataaaaactagacagaatgattctcagaaactcctttgtgatgtgtgtgttcaactcacagagtttaaccttttttttcatagagcagttagtaaacactctgtttataaagtctgcaagtggatattcagacccctttgaggccttcgttggaaacgggatttcttcatattatgctagacagaagaattctcagtaacttccttgtgttgtgtttattcaactcacagagttgaatgatcctttacacagagcagacttgaaacactctttttgtggaatttgcaagtggaggtttcagccgctttgaggtcaatggtagaaaagtaaatatcttcgtataaagactagacagaatgattctcagaaactcctttgtgatgtgtgcgttcaactcacagagtttaacctttctgttcatagagctgttaggaaacactctgtttgtaaagtctgcaagtggatattcagacctcctttaggccttcgttggaaacgggatttcttcatattctgctagacagaagaattctcagtaacttccttgtgttgtgtgtattcaactcacagagttgaacgatcctttacacagagcagacttgaaacactctttttgtggaatttgcaagtggagatttcagccgctttgaggtcaatagtagaaaaggaaatatctttgtagaaaaactagacagaatgattctcagaaactcctttgtgatgtgtgcgttcaactcacagagtttaacctttcttttcatagagcagttaggaaacactctgtttgtaaagtctgcaagtggatattcagacctctttgaggccttcgttggaaacgggtttttttcctataaggctagacagaagaattcccagtaacttccttgtgttgtgtgcattcaactcacagagttgaacgttcccttagacagagcagatttgaaacactctatttgtgcaatttgcaagtgtagatctcaagcgctttaaggtcaatgggagaaaaggaaatatcttcgtttcaaaactagacagaatcattcccacaaactgcgttgtgatgtgttcgttcaactcacagagtttaacctttctgttcatagagcagttaggaaacactctgtttgtaaagtctgtaagtggatattctgacatcttgtggccttcgttggaaacggtatttcttcctattctgctagacagaagaattctcagtaacttccttgtgttgtgtgtattcaactcacatagttgaacgatcctttacacagagcagacttgaaacactctttttgtggaatttgcaagtggagatttcagccgctttgaggtcaatagtagaaaaggaaatatcttcgtagaaaaactagacagaatgattctcagaaactcctttctgatgtgtgtgttcaactcacagagtttaacctttcttttcatagagcagttagtaaacactctgtttataaagtctgcaagtggatattcagaccccttggaggccttcgttggaaacgggttttcttcatattatgctagacagaagaattcccagtaacttccatgtgttatgtgtgttcaactcacagagttgaactttcatttacacagagcagatttgaaacactctttttgtggaatttgcaaatggagatttcaagcgctttgaggccagaggcagaaaaggaaatatcttcgtttaaaaactagacagaatgattctcagaaactcctttgtgatgtgtgcgttcaactcacagtagtttaacctttcttttcatagagcagttaggaaacactctggttgtaaagactacaagtggatattcagacctctttgaggccttcgttggaaacgggtttttttcctgtaagtctagacagaagaattcccagtaacttccttgtgttgtgtacattcaactcacagagttgaacgttcccttagacagagcagatttgaaacgctctttttgtgcaattggcaagtggagatttcaagcgctttaaggtcaatggcagaaaaggaaatatcttcgtttcaaaactagacagaatgattctcagaaaatcttttgtgatgtgtgcgttcaactcacagagtttaacttttcttctcatagagcagttaggaaacactctgtaaagtctgcaagtggatattcagacctctttgaggccttcgttggaaacgggatttcttcatattatgctagacagaataattctcagtaacttccttgtgttgtgtgtattcaactcacagagttgaaggatcctttacagagagcaggcttcaaacactctttttgtcgaatttgcaagtggagatttcagccgctttgaggtcaatggtagaataggaaatatcttcttatagaaactagacagaatgattctcagaaactcctttgtgatgtgtgcgttcaaatcacagagtttaacttttcttttcatagagcagttaggaaacactctgtttgtaaagtctgcaagtggatattcagacctctttgaggccttcgttggaaacgggatttcttcatattatgctagacagaagaattctcagtaacttccttgtgttgtgtgtattcaactcacagagttgaatgatcctttacacagtacagtcttgaaacactctttttgtggaatttgaaagtggagatttcagccgctttgaggtcaatggtagaataggaaataccttcctatagaaactagacagaatcattctcagaaactgctctgtgatgtgtgcgttcaactctcagagtttaacttttcttttcattcagcagtttggaaacactctgtttgtaaagtctgcacgtggatattttgaccacttagaggccttcgttggaaacgggttttttttcatgtaaggctagacggtagaattcccagtaacttccttgtgttgtgtacattcaactcacagagttgaacgttcccttagacagagcagatttgaaacactctttttgtgcaattggcaagtggagatttcaagcgctttaaggtcaatggcagaaaaggaaatatcttcgtttcaaaactagacagaatgattctcagaaaatcttttgtgatgtgtgcgttcaactcacagagtttaacttttcttctcatagagcagttaggaaacactctgtttgtaaagtctgcaagtggatattcagacctctttgtggccttcgttggaaacgggatttcttcatattatgctagacagaataattctcagtaacttccttgtgttgtgtgtattcaactcacagagttgaaggatcctttacagagagcaggcttgcaacactctttttgtcgaatttgcaagtggagatttcagccgctttgaggtcaatggtagaataggaaatatcttcttatagaaactagacagaatgattctcagaaagtcctttgtgatgtgtgtgttcaactcacagagtttaacctttctattcatagagtagttaggaaacactctgtttgtaaagtctgcaagtggatattttgacctctttgaggccttctttggaaacgggtttttttcatataaggctagacagaagaattcccagtaacttccttgtgttttgtgtgttcaactcacagagttgaactttcatttacacagagcagatttgaaacactctttttgtggaatttgcaagtggagatttcaagcgctttgaggccaaaggcagaaaaggaaatatcttcgtataaaaactagacagaatcattctcagaaactgctctgcgatgtgtgcgttcaactctcagagtttaacttttcttttcattcagaagtttggaaacactctgtttgtaaagtctgcacgtggataacttgaccacttagaggtcttcgttggaaacgggtttttttcatgtaaggctagacagaagaattctcagaatcttccttgtgttgtgtgtattcaactcacagagttgaacgatggtttacacagagcagatttgaaacactcttttggtggaatttgcatgtggagatttcagccgccttgaggtcaatggtagaaaaggaaatatcttcgtataaaaactagacagaatgattctcagaaacttctttgtgatgtgtgcgttcaactcacagagtttaacctttcttttcatagaacagttaggaaacactctgtttgtaaactctgcaagtggatattcagacctctttgaggccttcgttggaaacgggatttcttcatactatgctatatagaagaattctcagtaacttccttgtgttgtgtgtattcaactcacagagttgaacgatcctttacacagagcagacctgaaacactctttttgtggaatttgcaagtggagatttcagccgctttgaggtcaatggtagaataggaaatatcttcctatagaaactagacagaatgattctcagaaactcctttgtgatgtgtgcgttcaactcacagagtttaacctttcttttcatagagcagttaggaaacactctgtttgtaaagtctgcaagtggatattcagacatctttgaggccttcgttggaaacgggatttcttcatgttctgctagacagaagaattctcagaaactttccttgtgttgtgtgttttcaactcacagagttgaacgatgctttacacagagtagacttgaaacactctttttgtgtaatttgcaagtggagatttcagccgctttgaagtcaatggtagaaaaggaaatatcttcgtataaaaactagacagaatcattctcagaaactgctgcgtgatgtgtgcgttcaactctcagagtttaacttttcttttcattcagcggtttggaaacactctgtttgtaaagtctgcacgtggaaattttgaccacttagaggccttcgttggaaacgggtttttttcatgtaaggctagacagaagaattcccagtaacttccttgtgttgtgtgcattcaactcacagagttgaacgttcccttagacagagaagatttgaaacactctatttgtgcaatttccaagtgtagatttcaagcgctttaaggtcaacggcagaaaaggaaatatcttcgtttcaaaactagacagaatcattcccacaaactgcgttgtgatgtgttagttcaactcacagagtttaacctttcttttcatagagcagttaggaaacagtctgtttgtcaattctgtaagtggatattctgacatcttgtggccttcgttggaaacgggatttcttcatattctgctagacagaagaattctcagaaacttccttgtgttctgtgtattcaactcacagagttgaacgatcctttacacagagcagacttgaaacactctttttgtggaatttgcaagtggagatttcagtcgctttgaggtccatggtagaaaaggaaatatcttcgtataaaaactagacagaatgattctcagaaactgctttgtgatgtgtgcgttcaactcacagagtttaacctttcttttcatagagcagttaggaaacactctgtttgtaaagtctgcaagtggatattcagacatctttgaggctttcgttggaaacgggatttcttcatattctgctagacagaagaattcccagtaacttccttgtgttgtgtgtgttcaactcacagagttgaactttcattaacacagagcagatttgaaacactctttttgtggaatttgcaagtggagatttcaagcgctttgaggccaaaggcagaaaaggaaatgtcttcgtttcaaaactagacagaatcattctcagaaactgctctgcgatgtgtgagttcaactctcagagtttaacttttcttttcattcagcagtttggaaacactctgtttgtaaagtctccacgtggatattttgaccatttagaggctttcgttggaaacgggtttttttcttgtaaggctagacagaagaattcccaggaacttccttgtgttgtgtacattcaactcacagagttgaacgttcccttagacagagcagatttgaaacactctttttgtgcaattggcaagtggtgatttcagccgctttgaggtcaatggtagaaaaggaaatatcttcgtataaaaactagacagaattattctcataaactcctttgtgatgtgtgcgttcaactcacagagtttaacctttcttttcatagagcagttaggaaacactctgtttgtaaagtctgcaagtggatattcagacctctttgaggccttcgttggaaacgggatttcttcatattctgctagacagaagaattctcagaatcttccttgtgttgtgtgtattcaactcacacagttgaacgattgtttatacagagcagatttgaaacactctttttgtggaatttgcaagtggagatttcagccgctttgaggtcaatggtagaaaaggaaatatcttcgtataaaaactagacagaatgattctcagaaacttctttgtgatgtgtgcgttcaactcacagagtttaacctttcttttcatagagcagttaggaaacactctgtttgtaaactctgcaagtggatattcagacctctttgaggccttcgttggaaacgggatttcttcaaactatgctagacagaagaattctcagaatcttccttgtgttgtgtgttttcaactcacagagttgaacgatcctttacacagagcagacttgaaacactccttttgtggaatttgcaagtggagatttcagccgctttgaggtcaatggtagaataggaaatatcttcgtatagaaagtagacagaatcattctcagaaactgctctgcgatgtgtgcgttcaactctcagagtttaacttttcttttcattcagcagtttggaaacactctgtttgtaaagtctgcacgtggatattttgaccacttagaggccttcgttggaaacgggtttttttcctgtaaggctggacagaagaattcccagtaacttccttgtgttgtgtacattcaactcacagagttgaacgttcccttagacagagcagatttgaaacactctttttgtgcaattggcaagtggagatttcaagcgctttaaggtcaatggcagaaaaggaaatatcttcgtttcaaaactagacagaatcattcccacaaactgcgttgtgatgtgttcgttcaactcacagagtttaacctttcttttcatagagcagttaggaaacactctgttggtaaattctgtaagtggatattctgacatcttgtggcctccgttggaaacgggatttcttcatattctgctagacagaagaattctcagaatcttcccttgtgttgtgtgtattcaactcacagagttgaacgatcctttacacagagcagacttgaaacactctttttgtggaatttgcaagtggacatttcagccgctttgaggtccatggtagaaaaggaaatatcttcgtacaaaaactagacagaacgattctcagaaactcctttgtgatgtgtgcgttgaactcacagagtttaacctttcttttcatagagcagttaggaaacactctgtttgtaaagtctgcaagtggatattcagacctctttgaggccttcgttggaaacgggatttcttcatattctgctagacagaagaattctcagtaacttccttgtgttgtgtgtattcaactgacagagttgaactttcatttagagagagcagatttgaaacactgtttttgtggaatttgcaaatggtgacttcaagcgctttggggccaaacgcagaaaaggaaatatcttcgtataaaaactagacagaatcattctcagaaactgctctgtgatgtgtgcgttcaactctaagagtttaacttttcttttcattcagcagtttggaaacactctgtttgtaaagtctgcacgtggatattttgaccacttagaggccttctttggaaacgggttttttttcatgtaaggctagacagaagaattcccagtaacttccttgtgttgtgtacattcaactcacagagttgaacgttcccttagacagagcagatttgaaacactctttttgtgcaattggcaaatggagatttcaagcgctttaaggtcaatggcagaaaaggaaatatcttcgtttcaaaactagacagaatcattcccacaaactgcgttgtgatgtgttcgttcaactcacagagtttaacctttctgttcatagagcagttaggaaacactctgtttgtaaagtctgtaagtggatattctgacatcttgtagccttcgttggaaacgggatttcttcatattctgctagacagaagaattctcagtaacttccttgtgttgtgtgcattcaactcacagagttgaaagatcctttacacagagcaggttagaaacaatatttttgtggattttgcaagtggagatttcagccactttgaggtcaatggtagaaaaggaaatatcttcataaaaaaactacacagaatgattctcagaaactcctttgtgatgtgtgtgttcaactcacagagtttaacgtttcttttcatagagcagttagtaaacactctgtttataaattctgcaagtggatattcagacctctttgaggtcttcgttggaaacgggatttcttcatattatgctagacagaagaattctcagtaacttccttgtgttgtgtgtattcaactgacagagttgaactttcatttagagagagcagatttgaaacactgtttttgtgcaatttgcaagtggagatttcaagcgctttggggccaaaggcagaaaaggaaatatcttcgtataaaaactagacagaatcattctcagaaactgctgcgtgatgtgtgcgttcaactctcagagtttaacttttcttttcattcagcggtttggaaacactctgtttataaagtctgcacgtggatattttgaccacttagaggccttccttggaaacgggtttttttcatgtaaggctagacagaagaattcccagtaacttccttgtgttgtgtgcattcaactcacagagttgaacgttcccttagacagagcagatttgaaacactctatttgtgcaatttgcaagtgtagatttcaagcgctttaaggtcaacggcagaaaaggaaatatcttcgtttcaaaactagacagaatgattctcagaaactcctttgtgatgtgtgcgttcaactcacagagtttaacctttctgttcatagagcagttaggaaacactctgtttgtaaagtctgcaagtggatattcagacctccttgaggccttcgttggaaacgggatttcttcatattgtgctagacagaagaattctcagaatcgtccttgtgttgtgtgtattcaactcacagagttgaacgatggtttacacagagcagatttgaaacactctttttgtggaatttgcaagtggagatttcagccgctttgaggtcaatggtagaaaaggaaatatcttcgtataaaaactagacagagtgattctcagaaactcctttgtgatgtctgcgttcaactcacagagtttaacctttcttttcatagagcagttaggaaacactctgtttgtaaagtctgcaagtggatattcagacctctttgaggccttcgttgaaaacgggatttcttcatattctgctagacagaagaattctcagtaacttccttgtgttgtgtgtattcaactcacagagttgaacgatcctttacacagagcagacttgaaacactctttttgtggaatttgcaagtggagatttcaagcgctttggggccaaaggcagaaaaggacatatcttcgtataaaaactagacagaatcattctcagaaactgctgcgtgatgtgtgcgttcaactctcagagtttaacttttcttttcattcagcggtttggaaacactctgtttgtaaagtctgcacgtggatattttgaccacttagaggtcttcgttggaaacgggtttttttcatgtaaggctagacagaagaattctcagtaacttccttgtgttgtgtgtattcaactcagagagttgaacgatcctttacacagagcagacttgaaacactctttttgtggaatttgcaagtggagatttcagccgctttgaggtcaatggtagaataggaaatattttcctatagaaactagacagaatgattctgagaaactcctttgtgatgtgtgcgttcaactcacagagtttaacctttcttttcatagaacagttaggaaacactctgtttgtaaagtctgcaagtggatattcagacctccttgaggccttcgttggaaacgggatttcttcatattatgctagacagaagaattctcagtaacttccttgtgttgtgtgtattcaactcacagagttgaacgatcctttacacagagtagacttgaaacactctttttgtggaatttgcaagtggagatttcagccgctttgaggtcaatggtagaataggaaatatcttcctatagaaagtagacagaatgattctcagaaactcctttgtgatgtgtgcgttcaactcacagagtttaacctttcttttcatagagcagttaggaaacactctgtttgtaaagtctgcaagtggatattcagacctccttgaggccttcgttggaagcgggatttcttcatgttctgctagacagaagaattctcagtaacttccctgtgttgtgtgtattcaactgacagagtcgaactttcatttagagagagcagatttgtaacactgtttttgtggaatttgcaagtggagatttcaagcgctttggggccaaaggcagaaaaggaaatatcttcgtataaaaactagacagaatcattctcagaaactgctctgcgatgtgtgcgttcaactctcagagtttaacttttcttttcattcagcagtttggaaacactctgtttgtaaagtctgcacgtggatattttgaccacttagaggccttcgttggaaacgggttttttcctgtaaggctagacagaagaattcacagtaacttccttgtgttgtgtacattcaactcacagagttgaacgttcccttagacagagcagatttgaaacactctttttgtggaatttgcaagtggagatgtcaagcgctttgaggccaaaggcagaaaaggaaatatcttcgtttcaaaactagacagaatgattctcagaaactcctttgtgatgtgtgcgttcaactcacagagtttaacctttcttttcatagagcagttaggaaacactctgtttgtaatgtctgcaagtggatattcagacatccttgaggctttcgttggaaacgggatttcttcatattctgcaagaaagaagaattctcagtaacttccttgtgttgtgtgtattcaactcacagagttgaatgatcctttacacagaacagtcttgaaacactctttttgtggaatttgcaagtggagatttcagcctctttgaggtctatggtagaataggaaatatcttcctatagaaactagacagaatgattctcagaaactcctttgtgatgtgtgcgttcaactcacagagtttaacctttcttttcatagagcagttaggaaacactctgtttgtaatgtctgcaagtggatattcagacctctttgaggccttcgttggaaacgggtttttttcatataaggctagacagaagaattcccagtaacttccttgtgttgtgtgtgttcaactcacagagttgaactttcatttacacagcgcagatttgaaacactctttttgtggaatttgcaagtggagatttcaagcgctttgaggccaaaggcagaaaaggaaatatcttcgtttcaaaactagacagaatcattctcagaaactgctctgcgatgtgtgcattcaactctcagagtttaatttttcttttcattcagcagtttggaaacactctctttgtaaagtctgcacgtggatattttgaccacttagaggccttcgttggaaacgggttttattcttgtaaggctagacagaagaattcccagtaacttccttgtgttgtgtacattcaactcacagagttgaacgttcccttagacagagcagatttgaaacactctttttgtgcaattggcaagtggagatttcaagcgctttaaggtcaatggcagaaaaggaaatatcttcgtttcaaaactagacagaatcattcccacaaactgcgttgtgatgtgttcgttcaactcacagagtttaaccttccttttcatagagcagttaggaaacagtctgtttgtaaattctgtaagtggatattctgacatcttgtggccttcgttggaaacgggatttcttcatattctgctagacagaagaattctcagtaactgccttgtgttgtgtgtattcaagtcacagagttgaacgatcctttacacagagcagacttgaaacactctttttgtggaatttgcaagtggagatttcagccgctttgaggtcaatggtagaataggaaatatcttcctatagaaactagacagaatgattctcagaaactcctttgtgatgtgtgcgttcaactcacacagtttaacctttcttttcatagagcagttgggaaacactctgtttgtaaagtctgcaagtggatattcagacctccttgaggccttcgttggaaacgggatttcttcatattatgctaggcagaagaattcccagtaacttccttgtgttgtgtgtgttcaactcacagagttgaacttttatttacacagagcagatttgaaactctctttttgtggaatttgcaattggagatttcaagcgctttgaggccaaaggcagaaaaggaaatatcttcgtataaaaactagacagaatcactctcagaaactgctctgcgatgtgtgcgttcaactctcagagtttaacttttcttttcattcagcagtttggaaacactctgtttgtaaagtctgcacgtggatattttgaccactcagaggccttcgttggaaacggttttttttcctgtaaggctagacagaagaattcccagtaacttccttgtgttgtgtgcattcaactcacagagttgaacgttcccttagacagagcagatttgaaacactctatttgtgcaatttgcaaatgtagatttcaagcgctttaaggtcaatggcagaaaaggaaatatcttcgtttcaaaactagacagaatcattcccacaaactgcgttgtcatgagttcgttcaactcacagagtttaacctttcttttcatagagcagttaggaaacagtctgtttgtaaattctgtaagtggatattctgacatcttgtggccttcgttggaaacgggatttcttcatattctgctagacagaagaattctcagtaacttccttgtgttgtgtgtattcaactcacagagttgaacgatcctttacacagagcagacttgaaacactctttttgtggaatttgcaagtggagatttcagccgctttgaggtcaatggtagaaaaggaaatatcttcgtatgaagactagacagaatgattctcagaaactcctttgtgatgtgtgtgttcaactcacagagtttaacctttcttttcatagagcagttagtaaatactctgtttatacagtctgcaagtggatattcagacccctttgaggccttcgttggaaacgggatttcttcatattatgctagacagaagaattcccagtaacttccttgtgttgtgtgtgttcaactcacagagttgaactttcatttacacagagcagatttgaaacactctttttgtggaatttgcaagtggagatttcaagcgctgtgaggccaaaggcagaaaaggaaatatcttcgtataaaaactagacagaatcattctcagaaactgctgcgtgatgtgtgcgttcaactctcagagtttaacttttcttttcattcagcggtttggaaacactctgtttgtaaagtctgcacgtggatattttgaccacttagaggccttcgttggaaacgggttttttttcatgtaaggctacacagaagaattcccagtaacttccttgtgttgtgtgcattcaactcacagagttgaacgttcccttagacagagcagatttgaaacactctatttgtgcaatttgcaagtgtagatttcaagcgctttaaggtcaatggcagaaaaggaaatatcttcgtttcaaaactagacagaatgattctcataaactcctttgtgatgtgtgcgttcaactcaccgagtttaacctttcttttcatagagcagttaggaaacactctgtttgtaaagtctgcaagtggatattcagacctccttggggccttcgttggaaacgggatttcttcatattctgctagacataagaattctcagtaacttccttgtgctgtgtgtattcaactcacagagttgaacgatcctttacacagagcatacttgtaacactcttcttgtggaatttgcaagtggagatttcagccgctttgaggtcaatggtagaataggaaatatcttcgtataaaaactagacagaatgattctcagaaactcctttgtgatgtgtgcgttcaactcacagagtttaacctttcttttcatagagcagttaggaaacactctgtttgtaaagtctgcaagtggatattcagacctctttgaggccttcgttggaaacgggttttttacatataaggctaaacagaagaattcccagtaacttccttgtgttgtgtgtgttcaactcacagagttgaactttcatttacacagagcagatttgaaacactcattttgtggaatttgcaagtggagatttcaagcgctttgaggccaaaggcagaaaaggaaatatcttcgtttcaaaactagacagaatcattctcagaaactgctctgcgatgtgtgcgttcaactctcagagtttaacttttcttttcattcagcagtttggaaacactctgtttgtaaagtctgcacgtggataatttgaccacttagaggccttcgttggaaacgggtttttttcatgtaaggctagacagaagaattcccagtaacttccttgtgttgtgtgcattcaactcacagagttgaacgttcctttagacagagcagatttgaaacactctatttgtgcaatttgcaagtgtagatttcaagcgctttaaggtcaacggcagaaaaggaaatatcttcgtttcaaaactagacagaatcattcccacaaactgcgttgtgatgtgttcgttcaactcacagagtttaacctttcttttcatacagcagttaggaaacactctgtttgtaaactctgcaagtggatattcagacctctttgaggccttcgatggaaacgggatttctccatactatgctagacagaagaattctcagtaacttccttgtgttgtgtgtattcaactcacagagttgaacgatcctttacacagagcagacttgaaacactctttttgtggaatttgcaagaggagatttcagccgctttgaggtcaatagtagaaaaggaaatatcttcgtagaaaaactagacagaatgattctcagaaactcctttgtgatgtgtgcgttcaactcacagagtttaacctttcttttcatagagctgttaggaaacactctgtttgtaaagtctgcaagtggatattcagaactctttgaggccttcgttggaaacgggatttcttcttattctgctagagagaagaattcccagtaacttccttgtgttgtgtgtgttcaactcacagagttgaactttcatttacacagagcagatttgaaacactctttttgtggaatttgcaagtggagatttcaagcgctttgagaccaaaggcagaaaaggaaatatcttcgtataaaaactagacagaatcattctaagaaactgctctgcgatgtgtgcgttcaactctcagagtttaacttttcttttcattcagcagtttggaaacactctgtttgtaaagtctgcacgtggataacttgaccacttagaggccttcgttggaaacgggtttttttcatgtaaggctagacagaagaattcccagtaacttccttgtgttgtgtgcattcaactcacagagttgaacgttcccttagacagagcagatttgaaacactctatttgtgcaatttacaagtgtagttttcaagctctttaaggtcaacggcagaaaaggaaatatcttcgtttcaaaactagacagaatcattcccacaaactgcgttgtgatgtgttcgttcaactcagagagtttaacctttctgtacatagagcagttaggaaacactctgtttgtaaagtctgtaagtggatattctgacatcttgtggccttcgttggaaacgggatttcttcatattctgctagacagaagaattctcagtaacttccttgtgttgtgtgtattcaactcacagagtcgaacgatcctttacacagagcggacttgaaacactcgttttgtggaatttgcaagtggagatttcagccgatttgaggtcaatggtagaaaaggaaatatcttcgtataaaaactagacagagtgattctcagaaactcctttgtgatgtctgcgttcaactcacagagtttaacctttcttttcatagagcagttaggaaacactctgtttgtaaagtctgcaagtggatattcagacctccttgaggccttcattggaaacgggatttcttcatattctgctatacaaaagaattctcagaaacttccttgtgttgtgtgtattcaactcacagagttgaacgatcgtttacacagagcagacttgagacactctttttgtggaatttgtaagtggagatttcagccgctttgaggtcaatggtagaaaaggaaatatcttcatataaaaagtagacagaatgattctcagaatctcctttgtgatgtgtgcgttcaactcacagagtttaacctttcttttcatagagcagttaggaaacactctgtttgtaaagtctgcaagtggatattcagacctctttgaggccttcgttcgaaacgggttttcttcatattatgctagacagaagaattcccagtaacttccttgtgttgtgtgcattcaactcacagagttgaacgttcccttagacagagcagatttgaaacactctatttgtgcaatttgcaagtgtagatttcaagcgctttaaggtcaacggcagaaaaggaaatatcttcgtttcaaaactagacagaatgattctcagaaacttcattgtgacgtgttcgttcaactcacagagtttaacctttcttttcatagagcagttaggaaacactctgtttgtaaagtctgcaagtggatattcagacctctttgaggccttcgttggaaacgggatttcttcatactgtgctagacagaagaattctcagtaacttccttgtgttgtgtgtattcaactcacagagttgaacgatcctttacacagagcggacatgaaacacactttttgtggaatttgcaagtggagatttcagccgcgttgaggtcaatggtagaaaaggaaatatcttcgtataaaaactagacagaatgattctcagaaactcctttgtgatgtgtgtgtccaactcacagagtttaacctttcttttcatagagcagttaggaaacactctgtttgtaaagtctgcaagaggatattcagacctctttgaggccttcgttggaaacgggtttttttcatataaggctagacagaagaattcccagtaacttccttgtgttgtgtgtgttcaactcacagagttgaactttcatttacacagagcagatttgaaaccctctttttgtggaatttgcaaatggagatttctgccgcgttgaggtcaatggtagaaaaggaaatatcttcgtttcaaaactagacagaatcattctcagaaactgctctgcgatgtgtgcgttcaactcttagagtttaacttttcttttcagtcagcagtttggaaacactctgtttgtaaagtctgcacgtggatattttgaccacttagaggccttcgttggaaacgggtttttttcctgtaacgctagacagaagaattcccagtaacttccttgtgttgtgtgcattcaactcacagagttgaacgttcccttagacagagcagatttgaaacactctatttgtgcaatttgcaagtgtagatttcaagcgctttaaggtcaatggcagaaaaggaaatttcttcgtttcaaaactagacagaatgattctcagaaactcctttgtgatgagtgtgttcaactcacagagtttaacctttcttttcatagagcagttaggaaacactctgtttgtaaactctgcaagtggatattcagacctctttgaggccttcgttggaaacgggatttcttcatactgtgctagacagaagaattctcagtaacttccttgtgttgtgtgtattcaactcacagagttgaacgatcctttacacagagcggacttgaaacactctttttgtggaatttgcaagtggagatttcagccgcgttgaggtcaatggtagaaaaggaaatatcttcgtataaaaactagacagaatgattctcagaaactcctttgtgatgtgtgccgttcaactcacagagtttaacctttctttacatagagcagttaggaaacactctgtttgtaaagtctgcaagtggatattcagacctctttgaggccttcgttggaaacgggtttttttcatataaggctagacagaagaattctcagtaacttccttgtgttgtgtgtattcaactgacagagttgaactttgatttagagagagcagatttgaaacactgtttttgtggaatttgcaggtggagatttcaagcgatttggggccaaatgcagaaaaggaaatatcttcgtataaaaactagacagaatcattctcagaaactgctgcttgatgtgtgcgttcaactcacagagtttaacttttcttttcattcagcggtttggaaacactctgtttgtaaagtctgcacgtggatattttgaccacttagaggccttcgttggaaacgggattttttcatgtaaggctagacagaagaattcccagtaacttccttgtgttgtgtgcattccactcacagagttgaacgttcccttagacagagcagatttgaaacactctatttgtgcaatttgcaaatgtagatttcaagcgctttaaggtcaatggcaggaaaggaaatatcttcgtttcaaaactagacagaatgattctcagaaacttctttgtgatgtgtgcgttcaactcacagagtttaacctttcttttcatagagcagttaggaaacagtctgtttgtcaattctgtaagtggatattctgacatcttgtggccttcgttggaaacgggatttcttcatactatgctagacagaagaattctcagtaacttccttgtgttgtgtgtattcaactcacagagttgcacgatcctttacacagagcagacttgaaacactctttttgtggaatttgcaagtggagatttcagccgctttgaggtcaatggtagaataggaaatatcttcctatagaaactagacagaatgattctcagaaactcctttgcgatgtgtgcgttcaactcacagagtttaacctttcttttcatagagcagttaggaaacactctgtttgtaaagtctgcaaggggatattcagacctctttgaagccttcgttggaaacgggatttcttcatgttatgctagacagaagaattcccagtaacttccttgtgttgtgtgtgttcaactcacagagttgaactttcatttacacagagcagatttgaaacactctttttgtggaatttgcaaatggagatttcaagcgctttgaggccaaaggcagaaaaggaaatgtcttcgtttcaaaactagacagaatcattctcagaaactgctgcgtgatgtgcgcgttcaactctcagaatttaacttttcttttcattcagcggtttggaaacactctgtttgtaaagtctgcacgtggatattttgaccacttagaggccttcgttggaaacgggttttttgcatgtaaggctagacagaagaattctcagtaacttcccttgtgttgtgtgcattcaactcacagagttgaacgttcccttagacagagcagatttgaaacagcctatttttgcaatttgcaagtgtagatttcaagcgctttaaggtcaacggctgaaaaggaaatatcttcctttcaaaactagacagaacgattctcagaaactcctttgtgatgtgtgcgttcaactcatagagtttaacctttcttttcatagagcagttaggaaacactctgtttgtaaagtctgcaagtggatattcagacctctttgaggccttcgttggaaacgggatttcttcatattctgctagacagaagaattctcagtaacttccttgtgttgtgtgtattcaactcacagagttgaacgatcctttacacagagcagacttgaaacactctttttgtggaaattgcaattggaggtttcagccgctttgaggtcaatggtagaaaaggaaatatcttcgtataaaaactagacagaatgattctcagaaactcctttgtgatgtgtgcgttcaactcacagagtttaacctttctgttcatagagcagttaggaaacactctgtttgtaaagtctggaagtggatattcagacctccttgaggccttcgttggaaacggtatttcttcatattctgctagacagaagaattctcagtaacttccttgtgttgtgtgtattcaactgacagagttgaactttcatttagacagagcagatttgaaacactctttttgtggaatttgcaaaggtagatttcatgcgctttgaggccaaaggcagaaaaggaaatatcttcgtataaaaactagacagaatcattctcagaaactgctctgcgatgtgtgcgttcaactctcagagtttaacttttcttttcattcagcagtttggaaacactctgtttgtaaagtctgcaagtggatgttttgaccacttagaggccttcgttggaaacgggtttttttcatgtaaggctagacagaagaattcccagtaacttccttgtgttgtgtgcattcaactcacagatttgaacgttcccttagacagagcagatttgaaacactctttttgtgcaattggcaagtggagatttcaagcgctttaaggtcaatggaagaaaaggaaatatcttcgtttcaaaactagacagaatcattcccacaaactgcgttgtgatgtgttcgttcaactcacagagtttaacctttcttttcatagagcagttaggaaacagtctgtttgtaaattctgtaagtggatattctgacatcttgtggccttcgttggaaacgggatttcttcatattctgctagacagaagaattctcagaaacttccttgtgttgtgtgttttcaactcacagagttgaacgatgctttacacagagtagacttgaaacactctttttgtgtaatttgcaagtggagatttcagccgctttgaggtcaatggtagaaaaggaaatatcttaatatagaaactagatagaatgattctcagaaactcctttgtgatgtgtgcgttcaactcacagagtttgacctttcttttcatagagcagttaggaaacactctgtttgtaaagtctgcaactggatattcagacctctttgaggccttcgttggaaacgggtttttttcatataaggctagacagaagaattcccagtaacttccttgtgttgtgtgtgttcaactcacagagttgaactttcatgtacacagagcagatttgaaacactctttttgtggaatttgcaagtggagatttcaagcgctttgaggccaaaggcagaaaaggaaataactccgtttcaaaactagacagaatcattctcagaaactgctctgcgatgtgtgcgttcaactcttagagtttaacttttcttttcattcagcagtttggaaacactctgtttgtaaagtctgcacgtggataatttgaccacttagaggccttcgttggaaacgggtttttttcatgtaaggctagacagaagaattcccagtaacttccttgtgttgtgtacattcaactcacagagttgaacgttcccttagacagagcagatttgaaacactctttttgtgcaattggcaaatggagatttcaagcgctttaaggtcaatggcagaaaaggaaatatcttcgtttcaaaaccagacagaatgattctcagaaactccttagtgatgtgtgtgtccaactcacagggtttaaactttcttttcatagagcagttagcaaacactctgtttgtaaagtctgcaagaggatattcagacctctttgaggccttcgttggaaacgggtttttttcatataaggctagacagaagaattcccagtaacttccttgtgttgtgtgtgttcaactcacagagttgaactttcatttacacagagcagatttgaaacactctttttgtggaatttgcaaatggagatttcagccgcgttgaggtcaacggtagaaaaggaaatatcttcgtttcaaaactagacagaatcattctcagaaactgctctgcgatgtgtgcgttcaactctcagagtttaacttttcttttcattcagcagtgtggaaacactgtgtttgtaaagtctgcacgtggatattttgaccacttacaggccttcgttggaaacgggtttttttcctgtaaggctagacagaagaattcccagtaacttccttgtgttgtgtgcattcaactcacagagttgaacgttcccttagtcagagcagatttgaaacactctatttgtgcaatttgcaagtgtagatttcaagcgctttaaggtcaatggcagaaaaggaaatatcttcgtttcaaaactagacagaatgattctcagaaactcctttgtgatgtgtgcgttcaactcacagagtttaacctttcttttcatagagcagttaggaaacactctggttgtaaagtctgcaagtggatattcagacctgcttgaggccttcgttggaaacgggatttcttcatattatgctagacagaagaattctcagtaacttccttgtgttgtgtgtactcaactcacagagttcaacgatcctttacacagagcagacttcaaacactctttttgtggaatttgcaagtggagatttcagccgctttgaggtcaatggtagaataggaaatatcttcctatagaaactagacagaatgattctcagaaactcctttgtgacgtgtgtgcccaactcacagagtttaacctttcttttcatagagctgttaggaaacactctgtttgtaaagtctgcaagaggatattcagacctctttgaggccttcgttggaaacgggtttttttcatataaggctagacagaagaattcccagtaacttccttgtgttgtgtgtgttcaactcacagagttgaactttcatttaaacagagcagatttgaaacactctttttgtggaatttgcaaatggagatttcagccgcgttgaggtcaatggtagaaaaggaaatatcttcgtttcaaaactagacagaatcattctcagaaactgctctgcgatgtgtgcgttcaactctcagagtttaacttttcttttcattcagcagtgtggaaacactctgtttgtaaagtctgcacgtggatattttgaccacttagaggccttcgttggaaacgggtttttttcctgtaaggctagacagaagaattcccagtaacttctttgtgttgtgtgcattcaactcacagagttgaacgttcccttagagagagcagatttgaaacactctatttgtgcaatttgcaagtgtagatttcaagcgctttaaggtcaatgacagaaaaggaaatatcttcgtttcaaaactagacagaatcattcccacaaactgcgttgtgatgtgttcgttcaactcacagagtttaacctttcttttcatagagcagttaggaaacactctgttggtaaattctgtaagtggatattctgacatcttgtggccttcgttggaaacaggatttcttcatattctgctacacagaagaattctcagtaacttccttgtgttgtgtgtattcaactcacagagttgaacgatcctttacacagagcggacttgaaacacactttttgtggaatttgcaagtggagatttcagccgctttgaggtccatggtagaaaaggaaatatcttcgtataaaaactagacagagtgattctcagaaactcctttgtgatgtctgcgttcaactcacagagtttaacgtttcttttcatagagcagttaggaaacactctgtttgtaaagtctgcaagtggatattcagacctccttgaggccttcgttggaaacgggatttcttcatattctgctatacagaagaattctcagtaacttccttgtgttgtgtgtattcaactgacagagttgaactttcatttagagagagcagatttgaaacactgttttggtggaatttgcaagtggagatttcaagcgatttggggccaaaggcagaaaaggaaatatcttcgtataaaaactagacagaaatcattctcagaaactgctctgcgatgtgtgcgttcaactctcaggagtttaacttttcttttcattcagcagtttggaaacactctgtttgtaaagtctgcacgtggatattttgaccacttagaggccttcgttggaaacgggtttttttcctgtaaggctagacagaagaattctcagtaactttccttgtgttgtgtgtattcaactgacagagttgaactttcatttagagagagctgatttgaaacactgtttttgtggaatttgcaagtggagatttcaagcgctttggggccaaaggcagaaaaggaaatatcttcgtataaaaactagacagaatcattctcagaaactgctctgcgatgtgtgcgttcaactctcagtgtttaacttttcttttcattcagcagtttggaaacactctgtttgtaaagtctgcacgtggataatttgaccacttagaggtcttcgttggaaacgggtttttttcatgtaaggctagacagaagaattctcagaatcttccttgtgttgtgtgtattcaactcacagagttgaacgatggtgtacacagagcagatttgaaacactctttttgtggaatttgcaagtggagatttcagccgctttgaggtaaatggtagaaaaagaaatatcttcgtataaaaactagacagaatgattctcagaaacttctttgtgatgtgtgcgttcaactcacagagtttaacctttcttttcatagagcagttaggaaacactctgtttgtaaactctgcaagtggatattcagacctctttgaggccttcgttggaaacgggtttttttcatgtaaggctagacagaagaattctcagtaacttccttgtgttgtgtgtattcaacttacagagttgaactttcatttacacagagcagatttgaaacactctttttgtggaatttgcaaatggagatttcaagcgctttgaagccaaaggcagaaaaggaaatatcttcctataaaaactagacagaatgattctcagaaactcctttgtgatgtgtgcgttcaactcacagagtttaacctttcttttcatagagcagttaggaaacactctgcttgtaaagtctgcaagtggatattcagccctctttgaggcctttgttggaaacgggtttttttcatataaggctagacagaagaattcccagtaacttccttgtgttgtgtacattcaactcacagagttgaacgttcccttagacagagcagatttgaaacactctttttgtgcaattggcaagtggagatttcaagcgctttaaggtcaatggcagaaaaggaaatatcttcgtttcaaaactagacagaatgattctcagaaactcctttgtgatgtgtgcgttcaactcacagagtttaacctttcttttcatagagcagttaggaaacactctgtttgtactgtctgcaagtggatattcagacatccttgaggctttcgttggaaacgggatttcttcatattctgctagaaagaagaattctcagtaacttccttgtgttgtgtgtattcaactcacagagttgaacgatcctttacacagagcagacttgaaacactctttttgtggaatttgcaagtggagatttcagccgctgtgaggtcaatggtagaataggaaatatcttcctatagaaactagacagaatgatactcagaaactcctttgtgatgtgtgtgttcaactcacagagtttaacctttcttttcatagagcagttagtaaacactctgtttataaagtctgcaagtggatattcagacccctttgaggccttcgttggaaacgggatttcttcatattatgctagaaagaagaattctcagtaacttccttgtgttgtgtgtattcaactgacagagttgaactttcatttagagagagcagatttgaaacactgtttttgtggaatttgcaagtggagatttcaagagctttgggtccaaaggcagaaaaggaaatatcttcgtacaaaaactagacagaatcattctcagaaactgctgcgtgatgtgtgggttcaactctcagagtttaacttttcttttcattcagcggtttggaaacactctgtttgtaaagtctgcacgtggatattttgaccacttagaggccttcgttggaaaagggtttttttcatgtaaggctagacagaagaattcccagtaacttccttgtgttgtgtgcattcaactcacagagttgaacgttcccttagacagagcagatttgaaacactctatttgtgcaatttgcaagtgtagatttcaagcgctttaaggtcaacggcagagaaggaaatatcttcgtttcaaaactagacagaacgattctcagaaactcctttgtgatgtgtgctttcaactcacagagtttaacctttcttttcatagagcagttaggaaacactctgtttgtaaagtctgcaagtggatattcagacctccttgaggccttcgttggaaacgggatttcttcatattctgctagacagaagaattctcagtaacttccttgtgttgtgtgtattcaactcacagagttgaatgatcctttacacagagcagacttgaaacactctttttgtggaatttgcaagtggagatttcagccgctttgaggtcaatggtagaaaagtaaatatcttcgtataaagactagacagaaatgattctcagaaacttctttgtgatgtgtgcgttcaactcacagaagtttaacctttcttttcatagagcagttgggaaacactctgtttttaaagtctgcaagtggatattcagacctctttgaggccttcgttggaaacgggtttttttcatgtaaggctagacagaagaattctcagtaacttccttgtattgtgtgtattcaactcacagagttgaacgatcctttacacagaacagacttgaaacactctttttgtggaatttgcaagtggagatttcagccgctttgaggtcaatggtagaataggaaatatcttcctatagaaactagacagaatgattctcagaaactcctttgtgatgtgtgcattcaactcacagagtttaacctttcttttcattgagcagttaggaaacactctgtttgtaaagtctgcaagttgatattcagacctctttgaggccttcgttggaaacgggatttcttcatattatgctagacagaagaattcccagtaacttccttgtgttgtgcacattcaactcacagagttgaacgttcccttagacagagcagatttgaaacactctttttgtgcaattggcaagtggtgatttcagcctctttgaggtcaatggtagaaaaggaaatatcttcgtataaaaactagacagaatgattctcagaaacttctttgtgatgtgtgcgttcaactcacagagtttaacctttcttttcatagagcagttaggaaacactctgtttgtaaactctgcaagtggatattcagacctgtttgaggccttctttggaaacgggatttcttcatactatgctagacagaagaattctcagtaacttccttgtgttgtgtgtattcaactcacagagttgaacaatcctttacacagagcagacttgtaacactctttttgtggaatttgcaagtggagatttcagccgctttgaagtcaaaggtagaaaaggaaatatcttcctataaaaactagacagaatgattctcagaaactcctttgagatgtgtgcgctcaactcacagagtttaacctttcttttcatagagcagttaggaaacactctgtttgtaaagtctgaaggtggatattcagacctctttgaggccttcgttggaaatgggttttttcatataaggctagacagaagaattcccagtaacttccttgtgttgtgtgtgttcaactcacagagttgaactttcatgtacacagagcagatttgaaacactctttttgtggaatttgcaaatggagatttcaagcgctttgaggccaaaggcagaaaaagaaatatcttcgtataaaaactagacagaaatcattctcagaaactgctctgcgatgtgtgcgttcaactctcaggagtttaacttttcttttcattcagcagtttggaaacactctgtttgtaaagtctgcacgtggatattttgaccacttagaggccttcgttggaaacgggtttttttcctgtaaggctagacagaagaattcccagtaacttccttgtgttgtgtgcattcaactcacagagttgaacgttcccttagacagagcagatttgaaacactctatttgtgcaatttgcaagtgtagatttcaagcgctttaaggtcaacggcagaaaaggaaatatcttcgtttcaaaactagacagaatgattctcagaaactcctttgtgatgtgtgcgttcaactcacagagttcaacctttcttttcatagagcagttgggaaacactctgtttgtaaagtctgcaagtggatattcagtcttctttgaggccttcgttggaagcgggatttcttcatattctgctagacagaagaattctcagtaactgccttgtgttgtgtgtattcaactcacagagttgaacgatcctttacacagagcagacttgaaacactctttttgtggaatttgcaagtggagatttcagccgctttgaggtcaatggtagaataggaaatatcttcctatagaaactagacagaatgattcttagaaactcctttgtgatgtgtgcgttcaactcacagagtttaacctttctgttcatagagctgttaggaaacactctgtttgtaaagtctgcaagtggatattcagacctcctttaggccttcgttggaaacgggatttcttcatattctgctagacagaagaattcccagtaacttccttgtgttgtgtgtgttcaactcacagagttgaactttgatttacacagagcagatttgaaacactctttttgtggaatttgcaagtggagatttcaagcgctttgaggccaaaggcagaaaagggaatatcttcgtataaaaactagacagaacgattctcagaaacttctttgtgatgtgtgcgttcaactcacagagttaaaactttcttttcatagagcagttaggaaacactctgtttgtaaagactgcacgtggatattcagacctctttgaggccttcgttggaaacgggtttttttcctgtaagcctagacagaagaattcccagtaacttccttgtgttgtgtacattcaactcacagagttgaacgttcccttagacagagcagatttcaaacactctttttgtgcaattggcaagtggagatttcaagcgctttaaggtcaatggcagaaaaggaaatatcttcgtttcaaaactagacagaattattcccacaaactgcgttgtgatgtgttcgttcaactcacagagtttaacctttcttttcatagagcagttaggaaacactctgtttgtaaattctgtaagtggatattctgacatcttgtggccttcgttggaaacgggatttcttcatattctgctagacagaagaattctcagaatcttccttgtgttgtgtgtattcaactcacagagttgaacgatcctttaaacagagcggacttgaaacactctttttgtggaatttgcaagtggagatttcagccgctttgaggtcaatggcagaaaaggaaatatcttcgaataaaaactagacagaatgattctcagaaactcctttgtgatgtgtgcgttcaactcacagagtttaacttttcttttcatagagcagttaggaaacactctgtttgtaaagtctgcaagtggatattcagacctcttgaggccttcgttggaaacgggatttcttcatattatgctagacagaataattctcagtaacttccttgtgttctctgtattcaactcacagagttgaacgatcctttacagagagcagacttgaaacactctttttgtggaatttgcaagtggagatttcagccgctttgaggtcaatggtagaaaaggcaatatcttcgtataaagactagacagaatgattctcataaactcctttgtgatgtgtgcgttcaactcacagagtttaacttttcttttcatagagcagttaggaaacactctgtttgtaaagtctgcaagtggatattcagacctctttgaggccttcgttggaaatgggatttcttcatattatgctagacagaagaattcccagtaacttccttgtgttgtgtgcattcaactcacagagttgaacgttcccttagacagagcagatttgaaacactctatttgtgcaatttgcaagtgtagatttcaagcgctttaaggtcaatggcagaaaaggaaatatcttcgtttcaaaactagacagaatcattcccacaaactgcgttgtgatgtgtttcttcaactcacagagtttaacctttctgttcatagagcagttaggaaacgctctgtttgtaaagtctgtaagtggatattctgacatcttgtggccttcgttggaaacgggatttcttcctattctgctagacagaagaaatctcagtaacttccttgtgttgtgtgtattcaactcacagagttgaacgatcctttacacagagcagatttgaaacaatgtttttgtggaatttgcaagtggagatttcagccgctttgaggtcaatggcagaaaaggaaatatcttcttatagaaactagacagaatgattctcagaaactcctttgtgatgtgtgtgttcaactcacagagtttaacctttcttttcatagagcagttagtaaacactctgtttataaagtctgcaagtggatattcagaccccttgaggccttcgttggaaacgggatttcttcatattatgctagacagaagaattctcagtaacttccttgtgttgtgtgtattcaactgacagagttgaactttcatttagagagagcagatttgaaacactgtttttgtggaatttgcaagtggagatttcaagcgctttggggccaaaggcagaaaaggaaatatcttcgtttaaaaactagacagaatcattctcagaaactgctgcgtgatgtgtgcgttcaactctcagagtttaacttttcttttcattcagcggtttggaaacactctgtttgtaaagtctgcacgtggaaattttgaccacttagaggccttcgttggaaacgggtttttttcatgtaaggcaagacagaagaattcccaggaacttccttgtgttgtgtacattcaactcacagagttgaacgttcccttagacagagcagatttgaaacaccctttttgtgcaattggcaagtggtgatttcagccgctttgaggtcaatggtagaaaaggaaatatcttcgtataaaaactagacagaatcattcccacaaactgcgttgtgatgtgttcgttcaactcacagagtttaacctttctgttcacagagcagttaggaaacactctgtttgtaaagtctgtaagtggatattctgacatcttgtggccttcgttggaaacgggatttcttcatattctgctagacagagaagattctcagaaacttccttgtgttgtgtgttttcaactcacagagttgaacgatgctttacacagagtagacttgaaacactctttttgtgtaatttgcaagtggagatttcagccgctttgaagtcaatggtagaaaaggaaatatcttcgtataaaaactagacagatgattctcagaaactcctttgtgatgtgtgcgttcaactcacagagtttaacctttcttttcatagagcagttaggaaacactctgtttgtaaagtctgcaagtggatattcagacctccttgaggccttcgttggaaacgggatttcttcatattctgctagacagaagaattctcagtaacttccttgtgttgtgtgtgttcaactcacagagttgaactttcatttacacagagcagatttgaaacactctttttgtggaatttgcaaatggagatttcaagcgctttgaggccaaaggcagaaaaggaaatctcttcgtataaaaactagacagaatcattctcagaaactgctgcgtgatgtgtgcgttcaactctcagagtttaacttttgttttcattcagcggtttggaaacactctgtttgtaaagtctgcacgtggatattttgaccacttagaggccttcgttggaaacgggtttttttcatgtaaggctagacagaagaattcccagtaacttccttgtgttgtgtgcattcaactcacagagttgaacgttcccttagacagagcagatttgaaacactctatttgtgcaatttgcaagtgtagatttcaagcgctttaaggtcaatggcagaaaaggaaatatcttcgtttcaaaactagacagaatcattcccacaaactgcgttgtgatgtgttcgttcaactcacagagtttaacctttcttttcatagaccagttaggaaacagtctgtttgtcaattctgtaagtggatattctgacatcttgtggccttcgttggaaacgggatttcttcatattctgctagacagaagaattctcagaatcttccttgtgttgtgtgtattcaactcacacagttgaacgattgtttacacagagcagatttgaaacactctttttgtggaatttgcaagtggagatttcagccgcattgaggtcaatggtagaaaaggaaatatcttcgtataaaaactagacagaatgattctcagaaactcctttgtgatgtgtgcgttcaactcatagagtttaacctttcttttcatagagcagttaggaaacactctgtttgtaaagtctgcaagtggatattcagacctctttgaggccttcgttggaaacgggatttcttcatattctgttagacagaagaattctcagtaacttccttgtgttgtgtgtattcaactcacagagttgaacgatcctttacacagagcagacttgaaacactctttttgtggaatttgcaagtggagatttcagccgctttgaggtcaatagtagaaaaggaaaactatcttcatataaagactagacagaatcattctcagaaactgctctgtgatgtgtgcgttcagctctcagagtttaacttttcttttcattcagcagtttggaaacactctgtttgtaaagtctgcacgtggatattttgaccacttagaggccttcgttggaaacgggtttttttcctgtaaggctagacagaagaattctcagtaacttccttgtgttgtgtgtattcaactcacagagttgaatgatcctttacacagagcagacttgaaacactctttttgtggaatttgcaagtggagatttcagccgctttaagttcaatggtagaataggaaatatcttcctatagaaactagacagaatgattctcagaaactcctttgtgatgtgtgcgttcaactcacagagttcaacctttcttttcatagagcagttgggaaacactctgtttgtaaagtctgcaagtggatattcagacttctttgagaccttcgttggaagcgggatttttacatattctgctacacagaagaattctcagtaacttccttgttttgtgtgtattcaactcacagagttgaacgatcctttacacagagcagacttgaaacactctttttgtggaatttgcaagtggagatttcagccgctttgaggtcaatggtagaataagaaatatcttcctatagaaactagacagagtgattctcagaaactcctttgtgatgtctgcgtttaactcacagagtttaacctttcttttcatagagcagttaggaaacactctgtttgtaaagtgtgcaagtggatattcagacctccttgaggccttcgttggaaacgggatttcttcatattatgctagacagaagaattcccagtaacttcgttgtgttgtgtacattcaactcacagagttgaacgttcccttagagagagcagatttgaaatactctttttgtgcaattggcaagtggagatttcaagcgctttaaggtcaatggcagaaaaggaaatatcttcgtttcaaaactagacagaatcattctcagaaactgctgcgtgatgtgtgcgttcaactctcagagtttaacttttcttttcattcagcggtttggaaacactctgtttgtaaagtctgcacgtggatattttgaccacttagaggccttcgttggaaacgggtttttttcatgtaaggctagacagaagaattcccagtaacttccttgtgttgtgtgcattcaactcacagagttgaacgttcccttagacagagcagatttgaaacactccatttgtgcaatttgcaagtgtagatttcaagcgctttaaggtcaatggcagaaaaggaaatatcttcgtttcaatactagacagaatgattctcagaaactcctttgtgatgtgtgcattcaactcacagagtttaacctttcttttcacagagcagttaggaaacacactgtttgtaaagtctgcaagtggatattcagacctccttgaggccttcgttggaaacgggatttcatcatattatgctagacagaagaattctcagtaacttccttgtgttgtgtgtattcaactcacagagttgaacgatcctttacacagagcagacttgaaacactctttttgtggaatttgcaagtggagatttcagccgctttgaggtcaatggtagaataggaaatatctttctatagaaactagacagaatgattctcagaaaatcctttgtgatgtgtgcgttcaactcacagagtttaacctttcttttcatagagcagttaggaaacactctgtttgtaaagtctgcaagtggatattcagacccccttgaggccttcgttggaaacgggatttctacatattatgctagacagaagaattctcagtaacttccttgtgttgtgtgtattcaactcacagagttgaacgatcctttacacagagcagacttgaaacactctttttgtggaatttgcaagtggagatttcagccgctttgaggtcaatggtagaataggaaatatcttcctatagaatctagacacaacgattctcagaaactcctttgtgatgtgtgcgttcaactcacagagtttaacctttcttttcatagagcagttaggaaacactctgtttgtaaagtctgcaagtggatattcagacctctttgaggccttcgttggaaacgggtttttttcatataaggctagacagaagaattcccagtaacttccttgtgttgtgtgcattcaactcacagagttgaacgttcccttagacagagcagatttgaaacactctatttgtgcaatttgcaagtgtagatttcaagcgctttaaggtcaatggcagaaaaggaaatatcttcgtttcaaaactagacagaatcattcccacaaactgcgttgtgatgtgctcgttcaactcacagagtttaacatttctgttcatagagcagttaggaaacactctgtttgtaaagtctgtaagtggatattcagacatcttgtggccttcgttggaaacgggatttcttcctattctgctagacagaagaattctcagtaacttccttgtgttgtgtgtattcaactcacagagttgaacgatcctttacagagagcagacttgaaacactctttttgtggaatttgcaagtggagatttcagccgctttgaggtcaatggtagaataggaaatatcttcctatagaaactagacagaatgattctcagaaacttctttgtgatgtgtgcgttgaactcacagagtttaacctttcttttcatagagcagttaggaaacactctgtttgtaaactctgcaagtggatattcagacctctttgaggccttcgttggaaacgggatttcttcatattatgcctgagagaagaattcccagtaacttccttgtgttgtgtgtgttcaactcacagagttgaactttcatttacacagagcagatttgaaacactctttttgtggaatttgcaaatggaggtttcaagccctttgaggccaaaggcagaaaaggaaatatcttcgtataaaaactagacagaatcattctcagagactgctctgtgatgtgtgcgttcaactctcagagtttaacttttcttttcattcagcagtttggaaacactctgtttgtaaagtctgcacgtggataatttgaccacttagagaccttcgttggaaacgggtttttttcatgtaaggctagacagaagagttctcagtaacttccttgtgttgtgtgtattcaactcacacagttgaacgatcctttacagagagcagacttgtaacactctttttgtggaatttgcaagtggagatttcagccgctttgaagtcaaagtagaaaaggaaatatcttcctatagaaactagacagaatcattcccacaaactgcgttgtgatgtgttcgttcaactcacagagtttaacctttcttttcatagagcagttaggaaacagtctgtttgtaaattctgtaagtggatactctgacatcatgtggccttcgttggaaacgggatttcttcatattctgctagacagaagaattctcagaatcttccttgtgttgtgtgtattcaactcacagagttgaacgatggtttacacagagcagatttgaaacactctttttgtggaatttgcaagtggagatttcagccgctttgaggtcaatggtagaaaaggaaatatcttcggtataaaaactagacagaatgattctcagaaactcctttgtgatgtgtgcgttcaactcacagagattaacttttcttttcatagagcagttaggaaacactctgtttgtaaagtctgcaagtggatattcagacctctttgtggccttcgttggaaacgggatttcttcatattatgctacacagaagaattcaagtaacttccttgtgttgtgtgtgttcaactcacagagttgaactttgatttacacagagcagatttgaaacactctttttgtggaatttgcaagtggagatttcaagcgctttgaggccaaaggcagaaaaggaaataccttcgtataaaaactagacagaatcattctcagaaactgctgcgtgatgtgtgcgttcaactctcagagtttaacttttcttttcattcagcggtttggaaacactctgtttgtaaagtctgcacgtggatattttcaccacttagaggccttcgttggaaacgggttttttcatgtaaggctagacagaagaattcccagtaacttccttgtgttgtgtgcattcaactcacagagttgaacgttcccttagacagagcagatttgaaacactctatttgtgcaatttgcaagtgtagatttcaagcgctttaaggtcaacggcagaaaaggaaatatcttcgtttcaaaactagacagaatcattcccacaaactgcgttgtgatgtgttcgttcatctcacagagtttaacctttcttttcgtagagcagttaggaaacagtctgtttgtaaattctgtaagtggatattctgacatcttgtggccttcgttggaaacgggatttcttcatattctgctagacagaagaattctcagtaactttccttgtgttgtgtgtattcaactcacagagttgaacgatcctttacacagagcagacttgaaacactctttttgtggaatttgcaagtggagatttcagccgctttgaggtcaatggtagaaaaggaaatatcttcgtataaagactagacagaatgattctcataaactcctttgtgatgtgtatgttcaactcacagagtttaacttttctattcatagagtagttaggaaacactctgtttgtaaagtctgcaagtggatattttgacctctttgaggccttcgttggaaacgggtttttttcatgtaaggctagacagaagaattcccagtaacttccttgtgttgtgtgtgttcaactcacagagttgaactttcatttacacagagcagatttgaaacactctttttgtggaatttgcaagtggagatttcaagcgctttgaggccaaaggcagaaaaggaaatatcttcgtataaaaacttgacagaatcattctcagaaactgctgcgtgatgtgtgcgttccactctcagagtttaacttttcttttcattcagcggtttggaaacactctgtttgtaaagtctgcacgtggatattttgaccacttagaggccttcgttggaaacgggttttttttcatgtaaggctagacagaagaattcccagtaacttccttgtgttgtgtgcattcaactcacagagttgaacgttcccttagacagagcagatttgaaacactctatttgtgcaatttgcaagtgtagatttcaagcgctttaaggtcaacggcagaagaggaaatatcttcgtttcaaaactagacagaatcgttctcagaaactgctctgcgatgtgtgcgttcaactctcagagtttaacttttcttttcattcagcagtttggaaacactctgtttgtatagtctgcacgtggataatttgaccacttagaggccttcgttggaaacgggtttttttcatgtaaggctagacagaagaattctcagtaacttccttgtgttgtgtgtattcaactcacacagttgaacgatcctttacacatagcagacttgtaacactctttttgtggaatttgcaagtggagattccagccgctttgaagtcaaatgtagaaaaggaaatatcttcctataaaaactagacagaatgattctcagaaactcctttgtgatgtgtgcgttcaactcacagagtttaacctttcttttcatagagcagttaggaaacacgctgtttgtaaagtctgcaagtggatattcagacctgtttgaggccttcgttggaaacgggtttttttcatataaggctagacagaagaattctcagtaacttccttgtgtggtgtgtattcaactgacagagttgaactttcatttagagagagcagatttgaaacactgtttttgtggaatttgcaagtggagatttcaagcgctttggggccaaaggcagaaaaggaaatatcttcgtataaaaactagacagaaacattctcagaaactgatgcgtgatgtgtgcgttcaactctcagagtttaacttttcttttcattcagcggtttggaaacactctgtttgtaaagtctgcacgtggaaattttgaccacttagaggccttcgttggaaacgggtttttttcatgtaaggctagacagaagaattcccagtaacttccttgtgttgtgtacattcaactcacagagttgaacgttcccttagacagagcagatttgaaacactctttttgtgcaattggcaagtggtgatttcagccgctttgaggtcaatggtagaaaaggaaatatcttcgtataaaaactagacagaacgattcacagaaactcctttgtgatgtgtgcgttcaactcacagagtttaacctttcttttcatagagcagttaggaaacactctgtttgtaaagtctgcaagtggatattcagacctctttgaggccttcgttggaaacgggatttcttcatattctgctagacagaagaattctcagtaacttccttgtgttgtgtgtattcaactcacagagttgaacgatcctttacacagagcagacttgaaacactctttttggggaatttgcaagtggagatttcagccgctttgaggtcaatggtagaaaaggaaactatcttcatataaagactagacagaatgattctcagaaactcctttgtgatgtgtgcgttcaactcacagagtttaacctttctgttcatagagcagttaggaaacactctgtttgtaaagtctgcaagtggatattcagacctccttgaggccttcgttggaaacgggatttcttcatattctgctagacagaagaattcccagtaacttccttgtgttgtgtgtgttcaactcacagagttgaactttcatttacacagagcagatttgaaacactctttttgtggaatttgcaagtggagatttcaagcgctttgaggccaaaggcagaaaaggaaatatcttcgttccaaaactagacagaatcattctcagaaactgctctgcgatgtgtgccttcaactctcagagtttaacttttgttttcattcagcagtttggaaacactctgtttgtaaagtctgcacgtggatattttgaccacttagaggccttcgttggaaatgggtttttttcctgtaaggctagacagaagaattcccagtaacttccttgtgttgtgtacattcaactcacagagttgaacgttcccttagacagagcagatttgaaacactctttttgtgcaattggcaaatggagatttcaagcgctttaaggtcaatggcagaaaaggaaatatcttcgtttcaaaactagacagaatcattcccacagactgcgttgtgatgtgttcgttcaactcacagagtttaacctttcttttcatagagcagttaggaaacagtctgtttgtcaattctgtaagtggatattctgacatcttgtggccttcgttggaaacgggatttcttcatattctgctagacagaacaattctcagtaacttccttgtgttgtgtgtattcaactcacagagttgaacgatcctttacacagagcggacttgaaacactctttttgtggaatttgcaattggagatttcagccgcgttgaggtcaatggtagaaaaggaaatatcttcgtataaaaactagacagaatgattctcagaaactcctttgtgatgtgtgtgttcaactcacagagtttaacctttcttttcatagagcagttaggaaacactctgtttgtaaagtttgcaagtggatattcagacctctttgaggccttctttggaaacgggtttttttcatgtaaggctagacagaagaattctcattaacttccttgtgttgtgtttattcaactcacagagttgaatgatcctttacacagagcagacttgaaacactctttttgtggaatttgcaagtggagatttcagccgctttgaggtcaatagtagaaaaggaaatatcttcgtagaaaaactagacagaatcattctcagaaaccgctctgtgatgtgtgcgttcaactctcagagtttaacctttcttttcatagagcagttaggaaacactctgtttgtaaagtctgcacgtggatattttgaccacttagaggccttcgttggaaacgggtttttttcatgtaaggctagacagaagaattcccagtaacttccttgtgttgtgtacattcaactcacagagttgaacgttcccttagacagagcagacttgtaacactctttttgtggaatttgcaagtggagatttcagccgctttgaagtcaaaggtagaaaaggaaatatcttcatataaaaactagacagaatcattcccacaaactgcgttgtgatgtgttcgttcaactcacagagtttaacctttctgttcatagagcagttaggaaacactctgtttgtaaagtctgcaagtggatattcagacctcctagaggccttcgttggaaacgggatttctccatattctgctagacagaagaattctcagtaacttccttgtgttgtgtgtattcaactcacagagttgaacgatcctttacacagagcggacttgaaacactctttttgtgtaatttgcaagtggagatttcagccgcgttgaggtcaatggtagaaaagaaaatatcttcgtataaaaactagacagaatgattctcagaaactcctttgtgatgtgtgcgttcaactcacagagtttaacctttcttttcatagagcagttaggaaacacctctgtttgtaaagtctgcaagtggatattcagacctccttgaggccttcgttggaaacgggattttttcatattatgctagacagaagaattccctgtaacttccttgtgttgtgtgtgttcgactcacagagttgaactttcatttacacagagcagatttgaaacactctttttgtggaatttgcaagtggagatttcaagcgctttgaggccaaaggcagaaaaggaaatatcttcgtttcaaaactagacagaatcattctcagaaactgctctgcgatgtgtgcgttcaactctcagagtttaacttttcttttcattcagcagtttggaaacactctgtttgtaaagtctgcacgtggatattttcaccacttagaggccttcgttggaaacgggtttttttcctgtaaggctagacagaagaattcccagtaacttcattgtgttgtgtacattcaactcacagagttgaacgttcccttagacagagcagatttgaaacactctttttgtgcaattggcaagtggagatttcaagcgctttaaggtcaatggcagaaaaggaaatatgcttcgtttcaaaactagacagaatcattcccacaaactgcgttgtgatgtgttcgttcaactcacagagtttaacctttcttttcatagagcagttaggaaacagtctgtttgaaaattctgtaagtggatattctgacatcttgtggccttcgttggaaacgggaattcttcatattctgctagacagaagaattctcagtaacttccttgtgttgtgtgtattcaactcacggagttgaactatcctttacacagagcagacttgaaacactctttttgtggaatttgcaagtggagatttcagccgctttgtggtctatagtagaaaaggaaatatcttcgtagaaaaactagacagaatgattctcagaaactcctttgtgatgtgtgtgttcaactcacagagtttaacctttcttttcatagagcagttagtaaacactctgtttataaagtctgcaagtggatattgagacccctttgaggccttcgttggaaacgggatttcttcatattatgctagacagaagaattctcagtaacttcccttgtgttgtgtgtattcaactgacagagttgaactttcatttagagagagcagatttgaaacactgtttttgtggaatttgcaagtggagatttcaagcgctttggggccaaaggcagaaaaggaaatatcttcgtataaaaactaggcagaatcattctcagaaactgctctgcgatgtgtgcgttcaactctcagagtttaacttttcttttcattcagcagtttggaaacactctgtttgtaaagtctgcacgtggatattttggccacttagaggccttcgttggaaacgggtttttttcctgtaaggctagacagaagaattcccagtaacttccttccgttgtgtacattcaactcacagagttgaacgttcccttagacagagcagatttgaaacactctttttgtgcaattggcaagtggagatttcaagcgctttgaggtcaatggcagaaaaggaaatatcttcgtttcaaaactagacagaatcattcccacaaactgcgttgtgatgtgttcgttcaactcacagactttaacctttcttttcatagagcagttaggaaacagtctgtttgtaaataatgtaagtggatattctgacatcttgtggccttcgttggaaacgggatttcttcatattctgctagacagaagaattctcagtaacttccttgtgttgtgtgtattcaactcacagagttgaacgatcctttacagagagcagacttgaaacactctttttgtggaatttgcaagtggagatttcagccgctttgaggtcaatggtagaaaaggaaatatcttcgtataaagactagacagaatgattctcagaaactcctttgtgatgtgtgtgttcaactcacagagtttaacgtttcttttcatagagcagttagtaaacactctgtttataaagtctgcaagtggatattcagacctctttgaggtcttcgttggaaacgggatttcttcatattatgctagacagaagaattcccagtaacttccttgtgttgtgtgtgttcaactcacagagttgaactttcatttacacatagcagatttgaaacactctttttgtggaatttgcaagtggagatatcaaacgctttgaggccaaaggcagaaaaggaaatatcttcgcataaaaactagacagaatcattctcagaaactgctctgcgatgtgtgcgttcaactctcagagtttaacttttcttttcattcagcagtttggaaacactctgtttgtaaagtctgcacgtggataatttgaccacttagaggccttcgttggaaacgggtttttttcatgtaaggctagacagaagaattctcagtaacttccttgtgttgtgtgtattcaactcacagagttgaacgatcctttacacacagcagacttgtaacactctttttgtggaattcgcaagtggagatttcagccgctttgaagtcaaaggtagaaaaggaaatatcttcctataaaaactagacagaatcattcccacaaactgccttgtgatgtgttcgttcaactcacagagtttaacctttctgttcatagagcagttaggaaacactctgtttgtaaagtctgtaagtggatattctgacatcttgtggccttcgttggaaacgggatttcttcatattctgctagacagaagaattctcagtaacttctttgtgttgtgtgtattcaactcacagagttgagcgatcctttacacagagcagacttgaaacactcgttttgtggaatttgcaagtggagatttcagccgctttaaggtcaatggtagaaaaggaaatatcttcgtataaaaactagacagaatgattctcagaaaatcatttgtgatgtgtgcgttcaactcacagagtttaacttttcttctcatagagcagttaggaaacactgtttgtaaagtctgcaagtggatattcagacctctttgaggccttcgttggaaacgggatttcttcatattctgctagacagaagaattctcagtaacttccttgtgttgtgtgtattcaactcacagagttgaacgatcctttacacagagcagacttgaaacactctttttgtggaatttgcaagaggagatttcagccgctttgaggtcaatggtagaataggaaatatcttcatatagaaactagacagaatcattctcagaaactgctgtgtgatgtgtgcgttcaactctcagagtttaacttttcttttcattcagcggtttggaaacactctgtttgtaaagtctgcacgtggatattttgaccacttagaggccttcgttggaaacgggattttttcatgtaaggctagacagaagatttcccagtaacttccttgtgttgtgtacattcaactcacagagttgaacgttcccttagacagagcagatttgaaacactctttttgtgcaattggcaagtggagatttcaagcactttaaggtcaatggcagaaaaggaaatatcttcgtttcaaaactagacagaatcattcccacaaactgcgttgtgatgtgttcgttcaactcacagagtttaacctttctgttcatagagcagttaggaaacactctgtttgtaaagtctgtaagtggatattctgacatcttgtggccttcgttggaaacgggatttcttcatattctgctagacagaagaattctcagtaacttccttgtgttgtgtgtattcaactcacagagttgaacgatcctttacacagagcagacttgaaacactctttttgtggaatttgcaagtggagatttaagccgctttgaggtcaatagtagaaaggaaatatcttcgtagaaaaactagacagaacgattctcagaaactcctttgtgatgtgtgcgttcaactcacagagtttaacctttcttttcatagagcagttaggaaacactctgtttgtaaagtctgcaagtggatattcagacctctttgaggccttcgttggaaacgggatttcttcatattctgctagacagaagaattctcagtaacttccttgtgttgtgtgtattcaactcacagagttgaacgatcctttacacagagcagacttgaaacactctttttgtggaatttgcaagtggagatttcagccgctttgaggtcaatagtagaaaaggaaatatcttcgtagaaaaagtagacagaatcattctcagaaaatcctctgtgatgtgtgcgttcaactctcagagtttaacttttcttttcattcagcagtttggaaacactctgtttgtaaagtctgcacgtggatattttgaccacttagaggccttcgttggaaacgggtttttttcatgtaagggtagacagaagaattcccagtaacttccttgtgttgtgtgcattcaactcacagagttgaactttcctttagacagagcagatttgaaacactctatttgtgcaatttgcaagtgtagatttcaagcgctttaaggtcaatggcagaaaaggaaatatcttcgtttcaaaactagacagaatgatactcagaaactcctttgtgatgtgggcgttcaactcacagagtttaacctttcttttcataggagcagttaggaaacactctgtttgtaaagtctgcaagtggatattcagacctctttgaggccttcgttggaaacgggatttcttcatattatgctagacagaagatttctcagtaactttccttgtgttgtgtgtattcaactcacagagttgaacgatcctttacacagagcagacttgaaacactctttttgtggaatttgcaagtggagatttcagccgctttgagttcaatggtagaataggaaatatcttccaatagaaactagacagaatgattctcagaaactcctttgtgatgtgtgcgttcaactcacagagtttaacctttcttttcatagagcagttaggaaacactctgtttgtaaagtctgcaagtggatatacagacctctttgaggccttcgttggaaacgggatttcttcatattctgctagagagaagaattcccagtaacttccttgtgttgtgtgtgttcaactcacagagttgaactttcatttacacagagcagatttgaaacactctttttgtggaatttgcaagtggagatttcaagcgctttgaggccaaaggcagaaaaggaaatatcttcggtataaaaactagacagaatcattctcagaaactgctgcgtgatgtgtgcgttcaactgtcagagtttaacttttcttttcattcagcggtttggaaacactctgtttgtaaagtctgcacgtggatattttgaccacttagaggccttcgttggaaacgggtttttttcatgtaaggctagacagaagaattctcagtagcttccttgtgttgtgtgcattcaactcacagagttgaacgttcccttagacagagcagatttgaaacagcctatttgtgcaatttgcaagtgtagatttcaagcgctttaaggtcaacggcagaaaaggaaatatcttcctttcaaaactagacagaatcattcccacaaactgggttgtgatgtgttcgttcaactcacagagtttaacctttctgttcatagagcagttaggaaacactctgtttgtaaagtctgtaagtggatattctgacatcttgtggccttcgttggaaacgggatttcttcatattctgctagacagaagaattctcagtaacttccttgtgttgtgtgtattcaactcacagagttgaacgatcctttacacagagcagtcttgaaacactctttttgtgtaatttgcaagtggagatttcagccgctttgaggtcaatagtagaaaaggaaatatcttcgtagaaaaactagacagaatgattctcagaaactcctttgtgatgtgtgcgttcaactcagagtttaacctttcttttcatagagcagttaggaaacactctgtttgtaaagtctgcaagtggatattcagacctctttgaggccttcgttggaaacgggtttttttcatataaggctagacagaagaattcccagtaacttccttgtgttgtgtgtgttcaactcacagagttgaactttcatttacacagagcagatttgaaacactctttttgtggaatttgcaagtggagatttcaagcgctttgaggccaaaggcagaaaaggaaatatcttcgtttcaaaactagagagaatcattctcagaaactgctctgcgatgtgtgcgttcaactctcagagtttaactttgcttttcattcagcagtttggaaacactctgttagtaaagtctgcacgtggataatttgaccacttagaggccttcgttggaaacgggtttttttcatgtaaggctagacagaagaattcccagtaacttccttgtgttgtgtacattcaactcacagagttgaacgttcccttagacagagcagatttgaaacactctttttgtgcaattggcaaatggagatttcaagcgctttaaggtcaatggcagaaaaggaaatatcttcgtttcaaaactagacagaatcattcccacaaactgcgttgtgatgtgttcgttcatctcacagagtttaacctttcttttcgtagagcagttaggaaacagtctgtttgtaaattctgtaagtggatatcctgacatcttgtggccttcgttggaaacgggatttcttcatattctgctagacagaagaattctcagaatcttccttgtgttgtgtgtattcaactcacacagttgaacgattgtttacacagagcagatttgaaacactctttttgtggaatttgcaagtggagatttcagccgctttgaggtcaatggtagaaaaggaaatatcttcgtataaaaactagacagaatgattctcagaaactcctttgtgatgtgtgtgttcaactcacagattttaacctttcttttcctagagcagttagtaaacactctgtttataaagtctgcaagtggatattcagacccctttgaggccttcgttggaaacgggatttcttcatattatgctagacagagaattcccagtaacttccttgtgttgtgtgtgttcaactcacagagttgaactttcatttacacagaacagatttgaaacactctttttgtggaatttgcaagtggagatttcaagcgctttgaggccaaaggcagaaaaggaaatatcttcgtttcaaaactagacagaatcattctcagaaactgctctgcgatgtgtgcgttcaactctcaaagtttaacttttcttttcattcagcagtttggaaacactctgtttgtaaagtctgcacgtggataacttgaccacttagaggccttcgttggaaacgggtttttttcatttaaggctagacagaagaattcccagtaacttccttgtgttgtgtacattcaactcacagagttgaacgttcccttagacagagcagatttgaaacactctttttgtgcaattggcaagtggagatttcaagcgctttaaggtcaatggcagaaaaggaaatatcttcgtttcaaaactagacggaatcattcccacaaactgcgttgtgatgtgttcgttcatctcacagagtttaacctttcttttcatagagcagttaggaaacactctgtttgtaaattctgtaagtggatattctgacatcttgtggccttcgttggaaacgggatttcttcatattctgctagacagagaagattctcagtaacttccttgtgttgtgtgtattcaactcacagagttgaacgatcctttacacagagcagacttgaaacattctttttgtcgaatttgcaagtggagatttcagccgctttgaggtcaatggtagaataggaaatatcttcctatagaaactagacagacgattctcagaaactcctttgtgatgtgtgcgttcaactcacagagtttaacctttcttttcatagagcagttaggaaacactctgtttgtaaagtctgcaagtggatattcagacctctttgaggccttcgttggaaacgggatttcttcctattctgctagacagaagaattctcagtaacttccttgtgttgtgtgtattcaactcacagagttgaaggatcctttacactgagcagacttgaaacactctttttgtggaatttgcaagtggagatttcagccgctttgaggtcaatggtagaaaaggaaactatcttcatataaagactagacagaatcattctcagaaactgctctgcgatgtgtgcgttcaactctcagagtttaacttttcttttcattcagcagtttggaaacactctgtttgtaaagtctgcacgtggatattttgaccactcagaggccttcgttggaaacgggtttttttcctgtaaggctagacagaagaattcccagtaacttccttgtgttgtgtgcattcaactcacagagttgaacgttcccttagacagagcagatttgaaacactctatttgtgcaatttgcaagtgtagttttcaagctctttaaggtcaacggcagaaaaggaaatatcttcgtttcaaaactagacagaatcattcccacaaactgcgttgtgatgtgttcgttcaactcacagagtttaacctttctgttcatagagcagttaggaaacactctgtttgtaaagtctgtaagtggatattctgacatattgtggccttcgttggaaacgggatttcttcatattctgggcctagacagaagaattgtcagtaacttccttgtgttgtgtgtattcaactcacagagttgaacgatcctttacacagagcagacttgaaacactctttttgtggaatttgcaagtgtagttttcagccgctttgaggtcaatggtagaataggaaatatcttcctatagaaactagacagaatgattctcagaaactcctttgtgatgtgtgcgttcaactcacagagtttaacctttcttttcatagagcagttaggaaacactctgcttgtaaagtctgcaagtggatattcagccctctttgaggccttcgttggaaacgggtttttttcatataaggctagacagaagaattcccagtaacttcccttgtgttgtgtgtattcaactcacagagttgaactttcatttacacagagcagatttgaaacactctttttgtggaatttgcaagtggagatttcaagcgctttaaggccaaaggcagaaaaggaaatatcttcgtataaaaactagacagaatcattctcagaaactgctctgcgatgtgtgcgttcaactctcagagtttaacttttcttttcattcagaagtttggaaacactctgtttgtaaagtctgcacgtggataacttgaccacttagaggccttcgttggaaacgggtttttttcatgtaaggctagacagaagaattcccagtaacttgccttgtgttgtgtacattcaactcacagagttgaacgttcccttagacagagcagatttgaaacactctttttgtgcaattggcaaatggagatttcaagcgctttaaggtcaatggcagaaaaggaaattgttcgtttcaaaactagacagaatgattctcagaaacttctttgtgatgtgtgcgttcaactcacagagtttaacctttcttttcatagagcagttaggaaacactctgtttgtaaactctgcaagtggatattaagacctctttgaggtcttcgttggaaacgggatttcttcatactgtgctagacagaagaattctcagtaacttccttgtgttgtgtgtattcaactcacagagttgaacgatcctttacacagagcggacttgaaacactctttttgtggaatttgcaagtggagatttcagccgcgttgaggtcaatggtagaaaaggaaatctcttcgtataaaaactagacagaatgattctcagaaactcctttgtgatgtgtgcgttcaactcacagagtttaacctttctgttcatagagcagttaggaaacactctgtttgtaaagtctgcaagtggatattcagacctccttgaggccttcgttggaaacgggatttcttcatcttctgctagacagaagaattctcagtaacttcccttgtgttgtgtgtattcaactgacagagttgaactttcatttagagagagcagatttcaaacactgtttttgtggaatttgcaagtggagatttcaagcgctttggggtcaaaggcagaaaaggaaatatcttcgtataaaaactagacagaatcattctcagaaactgctctgtgatatgtccgttcaactctcagagtttaacttttcttttcattcagcagtttggaaacactctgtttgtaaagtctgcacgtggataatttgaccacttagaggccttcgttggaaatgggtttttttcatgtaaggctagacagaagaattcccagtaacttccttgtgttgtgtacattcaactcacagagttgaacgttcccttagacagagcagatttgaaacactctttttgtgcaattggcaagtggagatttcaagcgctttaaggtcaatggcagaaaaggaaatatcttcgtttcaaaactagacagaatgattctcagaaagtcctttgtgatgtgtgcgttcaactcacagagtttaccctttctgttcatagagcagttaggaaacactctgtttgtaaattctgcaagtggatattcagacctacttgaggtcttcggtggaaacgggacttcttcatattctgttagacagaagaattctcagtaacttccttgtgttgtgtgtattcaactcacagagttgaacgatcctttacacagagcagacttgaaacactctttttgtggaatttgcaagtggagatttcatccgctttgaggtcaatggtagaaaaggagactatcttcatataaagactagacagaatgattctcagaaactcctttgtgatgtgtgcgttcaactcacagagttgaacctttcttttcatagagcagttgggaaacactctgtttgtaaagtctgcaagtggatattcagacttctttgaggccttcgttggaagcgggatttcttcatattctgctagacagaagaattctcagaaacttccttgtgttgtgtgtattcaactgacagagttgaactttcatttagagagagcagatttgcaacactgtttttgtggaatttgcaagtggagatttcaagcgctttggggccaaaggcagaaaaggaaatatcttcggataaaaactagacagagaatcattctcagaaactgctctgcgatgtgtgcgttcaactctcagagtttaacttttcttttcattcagcagtttggaaacactctgtttgtaaagtctgcacgtggatattttgaccacttagaggccttcgttggaaacgggtttttttcctgtaaggctagacagtagaattcccagtaacttccttgtgttgtgtacattcaactcacagagttgaacgttcccttagacagagcagatttgaaacacactttttgtgcaattggcaagtggagatttcaagcgctttaaggtcaatggcagaaaaggaaatatcttcgtttcaaaactagacagaatcattcccacaaactgcgttgtgatgtgttcgttcatctcacagagtttaacctttcttttcatagtgcagttaggaaacactctgtttgtaaattctgtaagtggatattctgacatcttgtggccttcgttggaaacgggaattcttcatattctgctagacagaataattctcagtaacttccttgtgttgtgtgtattcaactcagagagttgaacgatcctttacagagagctgacttgaaacactctttttgtggaatttgcaagtggtgatctcagccgctttgaggtcaatggtagaataggaaatatcttcctatagaaagtagacagaatgattctcagaaactcctttgtgatgtgtgcgttcaactcacagagtttaacctttcttttcatagagcagttaggaaacactctgtttgtaaagtctgcaagtggatattcagacctccttgaggccttcgttggaaacgggtttttttcatataaggctagacagaagaattcccagtaacttccttgtgttgtgtgtgttcaactcacagagttgaactttcatttacacagagcagatttgaaacactctttttgtggaatttgcaagtggagatttcaagcgctttgaggccaaaggcagaaaaggaaatatcttcgtttcaaagctagacagaatcattctcagaaactgctgcatgatgtgtgcgttcaactgtcagagtttaacttttcttttcattcagcggtttggaaacactctgtttgtaaagtctgcacgtggatattttgaccacttagaagccttcgttggaaaagggtttttttcatgtaaggctagacagaagaattcccagtaacttccttgtgttgtgtgcattcaactcacagagttgaacgttcccttagacagagcagatttgaaacactctatttgtgcaatttgcaagtgtagatttcaagcgctttaaggtcaatggcagaaaaggaaatatcttcgtttcaaaactagacagaatcattcccacaaactgcgttgtgatgtgttcgttcaactcacagagtttaacctttctgttcatagagcagttaggaaacactctgtttgtaaagtctgaaagtggatattctgacatcttgtggccttcgttgggaacgggatttcttcatattctgctagacagaagaattctcagaatcttccttgtgttgtgtgtattcaactcacagagttgaacgatggtttacacagagcagatttgaaacactctttttgtggaatttgcaagtggagatttcagccgctttgaggtcaatggtagaaaatgaaatatcttcgtataaaaactagacagaatgattctgagaaactcctttgtgatgtgtgcgttcaactcacacagtttaacctttcttttcatagagcagttaggaaacactctgtttgtaaagtctgcaagtggatattcagacctccttgaggccttcgttggaaacgggatttcttcatattatgctagacagaagaattctcagtaacttccttgtgttgtgtgtattcaactgacagagttgaactatcatttagagagagcagatttgaaacactgtttttgtggaatttgcaagtggagatttcaagcgctttggtgccaaaggcagaaaaggaaatatcttcgtataaaaactagacagaatcattctcagaaactgctctccgatgtgtgcgttcaactctcagagtttaacttttcttttcattcagcagtttggaaacactctgtttgtaaagtctgcacgtggataatttgaccacttagaggccttcgttggaaacgggttttttttcatgtaaggctagacagaagaattcccagtaacttccttgtgttgtgtgcattcaactcacagagttgaacgttcccttagacagagcagatttgaaacactctatttgtgcaattggcaagtgtagatttcaagcgctttaaggtcaatggcagaaaaggaaatatcttcgtttcaaaactagacagaatcattcccacaaactgcgttgtgatgtgttcgttcaactcacagagtttaacctttctgttcatagagcagttaggaaacactctgtttgtaaagtctgtaagtggatattctgacatcttgtggccttcgttggaaacgggatttcttcatattctgctagacagaagaattctcagaaacttccttgtgttgtgtgtattgaactcacagagttgaacgatcgtttacacagagcagacttgagacactctgtttgtgtaatttgtaagtggagatttcagccgctatgaggtcaatggtagaaaaggaaatatcttcatataaaaactagacagaatgattctcagaaactcctttgtgatgtgtgcgttcaactcacagagtttaacctttcttttcatagagcagttagtaaacactctgtttgtaaagtctgcaagtggatattcagacccctttgaggccttctttggaaacgggatttcttcatattctgctagacagaagaattctcagtaacttccttgtgttgtgtgcattcaactgacagagttgaactttcatttagagagagcagatttgaaacactgtttttgtggaatttgcaagtggagatttcaagcgctttggggccaaaggcagaaaaggaaatatcttcgtataaaaactagacagaatgattctcagaaactcctttgtgatgtgtgcgttcaactcacagagtttaacctttcttttcatagagcagttaggaaacactctccttgtaaagtctgcaagtggatattttgaccacttagaggccttcgttggaaacgggtttttttcatataaggctagacagaagaattcccagtaacttccttgtgttgtgtacattcaactcacagagttgaacgttcccttagacagagcagatttgaaacactatttttgtgcaattggcaagtggagatttcaagcgctttgaggtcaatggcagaaaaggaaatatcttcgtttcaaaactagacagaatcattcccacaaaactgcgttgtgatgtgttcgttcaactcacagagtttaacctttctgttcatagagcagttaggaaacactctgtttgtaaagtctgtaagtggatattctgacatcttgtggccttcgttggaaacgggatttcttcatattctgctagacagaagaattctcagtaacttccttgtgttgtgtgtattcaactcacagagttgaatgatcctttacacagaacagtcttgaaacactctttttgtggaatttgcaagtggagatttcatccgctttgaggtcaatggtagaatagggaatatcttcctatagaaactagacagaatgattctcagaaactcctttgtgatgtgtgcgttcaactcacagagtttaacctttcttttcatagagcagttaggaaacactctgtttgtaaagtctgcaagtggatattcagacatctttgaggctttcgttggaaacgggatttcttcatattctgctaggcagaagaattctcagaaacttcgatgtgttgtgtgttttcaactcacagagttcaacgatcatttacacagagtagacttgaaacactctttttgtggaattggcagggtggagatttcagccgctttgaggtcaaaggtagaaaaggaaatatcttcgtataaaaactagacagaatgattctaagaaactcctttgtgatgtgtgcgttcaactcacagagtttaacctttcttttcatagagcagttgggaaacactctgtttgtaaagtctgcaagtggatattcagacatccttgaggctttcgttggaaacgggatttcttcatattctgctagaaagaagaattctcagtaacttccttgtgttgtgtgtatgcaactcacagagttgaatgatcctttacacagagcagacttgaaacactctttttgtggaatttgcaagtggagatttcagccgctttgaggtcaatggtagaaaagtaaatatcttcgtataaagactagacagaatgattctcagaaactcctttgtgatgtgtgcgttcaactcacagagtttaacctttctgttcatagagcagttaggaaacactctgtttgtatagtctgcaagtggatattcagacctccttgaggccttcgttggaaacgggatttcttcaatattctgctagacagaagaattctcagtaacttccttgtgttgtgtgtattcaactcacagagttgaacgatcctttacacagagcagacttgaaacactctttttgtggaatttgcaagtggagatttcagccgctttcaggtcaatagtagaaaaggaaatatcttcgtagaaaaactagacagaatgattctcagaaactcctttgtgatgtgtgcgttcaactcacagagtttaacttttcttttcatagagccgttaggaaacactctgtttgtaaagtctgcaagtggatattcagacctctttgaggccttcgttggaaacgggatttcttcatattatgctagacagaagaattctcagtaacttccttgtgttgtgtgtattgaactcacagagttgaacgatcctttacacagagcagacttgaaacattctttttgtggaatttgcaagtggagatttcagccgctttgaggtcaatggtagaataggaaatatcttcctatagaaactagacagaatcattctcagaaactgctgcgtgatgtgtgcgttcaactctcagagtttaacttttcttttcattcagcggtttggaaacactctcgtttgtaaagcctgcacgtggatattttgaccacttagaggccttcgttggaaacgggtttttttcatgtaaggctagacagaagaattctcagtaacttccttgtgttgtgtgtattcaactcacagagttgaacgatcctttacacagagcagacttgaaacactctttttgtggaatttgcaactgtagatttcaagcgctttaaggtcaatggcagaaaaggaaatatcttcgtttcaaaactagacagaatgattctcagaaactcctttgtgatgtgtgcgttcaactcacagagtttaacctttctgttcatacagcagttaggaaacactctgtttgtaaagtctgcaagtggatattcagacctccttgaggccttcgttggaaacgggatttcttcatattctgctagacagaagaattctcagaaacttccttgtgttgtgtgttttcaactcacagagttgaacgatcctttacacagagcagacttgaaacactccttttgtggaatttgcaagtggagatttcagccgctttgagttcaatggtagaataggaaatatcttcctatagaaactagacagaatgattctcagaaactcctttgtgatgtgtgcgttcaactcacagagtttaacctttcttttcatagagcagttaggaaacactctgtttgtaaagtctgcaagtggatattcagacatccttgaggctttcgttggaaacgggatttcttcatattctgctagaaagaagaattctcagtaacttccttgtgttgtgtgtattcaactcacagagttgaacgatcctttacacagagcagacttgaaacactctttttgtggaatttgcaagtggagatttcagcctctttgaggtcaatggtagaataggaaatatcttcctatagaaagtagacagaatcattctcagaaactgctgcgtgatgtgtgcgttcaactctcagagtttaacttttcttttcattcagcggtttggaaacactctgtttgtaaagtctgcacgtggaaattttgaccacttagaggccttcgttggaaacgggtttttttcatgtaaggctagacagaagaattcccagtaacttccttgtgttgtgtacattcaactcacagagttgaacgttcccttagacagagcagatttgaaacactctttttgtgcaattggcaagtggagatttcaagcactttaaggtcaatggcagaaaaggaaatatcttcgtttcaaaactagacagaatcattcccacaaactgcgttgtgatgtgttcgttcaactcacagagtttaaactttcttttcatagagcagttaggaaacagtctgtttgtaaattctgtaagtggatattctgacatcttgtggccttcgttggaaacgggatttcttcatattttgctagacagaagaattctcagtaacttccttgtgttgtgtgtattcaactcacagagttgaatgatcctttacacagagcagacttgaaacactctttttgtggaatttgcaagtggagatttcagccgctttgaggtcaatggtagaaaaggaaactatcttcatataaagactagacagaatgattctcagaaactcctttgtgatgtgtgcgttcaactcacagagtttaacctttcttttcatagagcagttaggaaacactctctaaagtctgcaagtggatattcagacctccttgaggtcttcgttggaaacgggatttcttcatattctgccagacagaagaattctcagtaacttccttgtgttgtgtttattcaactcacagagttgaatgatcctttacagagagcagacttgaaacactctttttgtggaatttgcaagtggagatttcagccgctttgaggtcaatggtagaaaagtaaatatcttcctataaagactagacagaatgattctcagaaactcctttgtgatgtgggcgttcaactcacagtgtttaacctttcttttcatagagcagttgggaaacactctgtttgtaaagtctgcatgtggatatttggacttctttgaggctttcgttggaaacgggtttttttcatgtaaggctagacagaagaattcccagtaactttccttgtgttgtgtacgttcaactcacagagttgaacgttcccttagacagagcagatttgaaacactctttttgtgcaattggcaagtggagatttcaagcgctttaagttcaatggcagaaaaggaaatatcttcgtttcaaaactagacagaatcattcccacaaactgcgttgtgatgtgttcgttcatctcacagagtttaacctttcttttcatagagcagttaggaaacagtctgtttgtcaattctgtaagtggatattctgacatcttgtggccttcgttggaaacgggatttcttcatattctgctagacagaagaattctcagtaacttaccttgtgttgtgtgtattgaactcgcagagttgaacgatcctttacacagagcagacttgaaacactctttttgtggaatttgcaagtggagatttcagccgctttgaggtcaatagtagaaaaggaaatatcttcgtagaaaaactagacagaatgattctcagaaactcctttgtgatgtgtgtgttcaactcacgaagtttaacctttcttttcatagagcagttagtaaatactctgtttataaagtctgcaagtggatattcagacccctttgaggccttcgttggaaacgggatttcttcatattatgctagacagaagaattcccagtaacttccttgtgttgtgtgtgttcaactcacagagttgaactttcatttacacagagcagatttgaaaccctctttttgtggaatttgcaagtggagatttcaagggctttgaggccaaaggcagaaaaggaaatgtcttcgtttcaaaactagacagaatcattctcagaaactgctgcgtgatgtgtgcgttcaactctcagagtttaacttttcttttcattcagcggtttggaaacactctgtttgtaaagtctgcacgtggatattttgaccacttagaggccttcgttggaaacggaattttttcatgtaaggctagacagaagaattcccagtaacttccttgtgttgtgtacattcaactcacagagttgaacgttcctttagacagagcagatttgaaacactctttttgtgcaattggcaagtggagatttcaagcgctttaaggtcaatggcagaaaaggaaatatcttcgtttcaaaactagacagaatcattcccacaaactgcgttgtgatgtgttcgttcaactcacagagtttaacctttcttttcatagagcagttaggaaacagtctgtttgtaaattctgtaagtggatattctgacatcttgtggcattcgttggaaacgggatttcttcatattctgctagacagaagaattctcagtaacttccttgtgttgtgtgtattcaactcacagagttgcacgatcctttacacagagcagacttgaaacactctttttgtggaatttgcaagtggagatttcagccgctttgaggtcaatagtagaaaaggaaatatcttcgtagaaaaactacacagaatgattctcagaaaatcttttgtgatgtgtgcgttcaactcacagagtttaacttttcttctcatagagcagttaggaaacactctgtttgtaaagtctgcaagtggatattaagacctctttgaggccttcgttggaaacgggatttcttcatattatgctagacagaagaattctcagtaacttccttgtgttgtgtgtattcaactgacagagttgaactttcatttagagagagcagatttgaaacactgtttttgtggaatttgcaagtggagatttcaagcgctttcgggccaaaggcagaaaacgaaatatcttcgtataaaaactagacagaatcattcttagaaactgctgcgtgatgtgtgcgttcaactctcagagtttaacttttcttttcattcagcggtttggaaacactctgtttgtaatgtctgcacgtggatattttgaccacttagaggccttcgttggaaacgggttttttgcatgtaaggctagacagaagaattctcagtaacttccttgtgttgtgtgcattcaactcacagagttgaacgttcccttagacagagcagatttgaaacagcctatttttgcaatttgcaagtgtagatttcaagcgctttaaggtcaacggctgaaaaggaaatatcttcctttcaaaactagacagaatgattctcagaaactcctttgtgatgtgtgcgttcaactcacacagtttaacctttcttttcatagagcagttaggaaacactctgtttgtaaagtctgcaagtggatattcagacctccttgaggccttcattggaaacgggatttcttcatattatgctagacagaagaattctcagtaacttccttgtgttgtgtgtattcaactcacagagttgaacgatcctttacacagagcagacttgaaacactccttttgtggaatttgcaagtggagatttcagccgctttgaggtcaatggtagaataggaaatatcttcctatagaaagtagacagaatgattctcagaaactcctttgtgatgtgtgcgttcaactcacagagtttaacctttcttttcatagagcagttaggaaacactctgtttgtaaagtctgcaagtggatattcagacctctttgaggccttcgttggaaactgggtttttttcatataaggctagacagaagaattcccagtaacttccttgtgttgtgtgtgttcaactcacagagttgaactttcatttacacagagcagatttgaaacactctttttgtggaatttgcaagtggatatttcaagcgctttgaggccaaaggcagaaaaggaaatatcttcgtttcaaaactagacagaatcattctcagaaactgctgcgtgatgtgtgcgttcaactctcagagtttaacttttcttttcattcagcggtttggaaacactctgtttgtaaagtctgcacgtggaaattttgaccacttagaggccttcgttggaaacgggtttttttcatgtaaggatagacagaagaattcccagtaacttccttgtgttgtgtgcattcaactcacagagttgaacgttcccttagacagagcagatttgaaacactctatttgtgcaatttgcaagtgtagatttcaagcgctttaaggtcaacggcagaaaaggaaatatcttcgtttcaaaactagacagaatgattctcagaaactcctttgtgatgtgtgcgttcaactcacagagtttaacttttcttttcatagagcagttaggaaacactctgtttgtaaagtctgcaagtggatattcagacctctttgaactcttcgttggaaaagggatttcttcatattatgctagacagaatacttctcagtaacttccttgtgttgtgtgtattcaactcacagagttgaacgatcctttacagagagccgacttgaaacactctttttgtggaatttgcaagtggagatttcagccgctttgaggtcaatggtagaaaaggaaatattttcgtataaagactagacagaatgattctcagaaaatcctttgtgatgtgtgcgttcaactcacagagcttaacctttcttttcatagagcagttaggaaacactctgtttgtaaagtctgcaagtggatattcagacacctttgaggccttcgttggaaacgggatttcttcatgttctgctagacacaagaattctcagtaacttccttgtgttgtgtgtattcaactgacagagttgaacgatcctttacacagagcagacttgaaacactctttttgtggaatttgcaagtggagatttcaagcgcttcggggccaaaggcagaaaaggaaatatcttcgtataaaaactagacagaatcattctcagaaactgctgcgtgatgtgtgcgttcaactctcagagtttaacttttcttttcattcagcggtttggaaacactctgtttgtaaagtctgcacgtggaaattttgaccacttagaggccttcgttggaaacgggattttttcatgtaaggctagacagaagaattcccagtaacttccttgtgttgtgtacattcaactcacagagttgaacgttcccttagacagagcagatttgaaacactctttttgtgcaattggcaaatggagatttcaagcgctttaaggtcaatggcagaaaaggaaatatcttcgtttcaaaactagacagaatcattcccacaaactgcgttgtgatgtgttcgttcaactcacagagtttaacctttctgttcatagagcagttaggaaacactctgtttgtaaagtctgaaagtggatattctgacatcttgtggccttcgttggaaacgggatttcttcatattctgctagacagaagaattctcagtaacttccttgtgttgtgtgtattcaactcacagagttgaacgatcctttacacagagcagacttgaaacactctttttgtggaatttgcatgtggagatttcagccgctttgagttcaatggtagaatagaaaatatcttcctatagaaactagacagaatgattctcataaactcctttgtgatgtgtgcgttcaactcacagagtttaacctttcttttcatagagcagttaggaaacactctgtttgaaaagtctgcaagtggatattcagacctccttgaggccttcgttggaaacgggatttcttcatattctgctagacagaagaattctcagtaacttccttgtgttgtgtttattcaactcacagagttgaatgatcctttacacagagcagacttgaaacactctttttgtggaatttgcaagtggcgatttcagccgctttgaggtcaatgatagaaaagtaaatatcttcgtataaagactagacagaatcattctcagaaactgctctgcgatgtgtgcgttcaactctcagagtttaacttttcttttcattcagcagtttggaaacactctgtttgtaaagtctgcacgtggatattttgaccacttagaggccttcgttggaaacgggtttttttcctgtaaggctaaaaagaagaattcacagtaacttccttgtgttgtgtacattcaactcacagagttgaacgttcccttagacagagcagatttgaaacactctttttgtgcaattggcaagtggagatttcaagcgctttaaggtcaatggcagaaaaggaaatatcttcctttcaaaactagacagaatcattcccacaaactgcgttgtgatgtgttcgttcatctcacagagtttaacctttcttttcgtagagcagttaggaaacagtctgtttgtaaattctgtaagtggatattctgacatcttgtggccttcgttggaaacgggatttcttcatattctgctagacagaagaattctcagtaacttccttgtgttgtgtgtattcaactcacagagttgaacgatcctttacagagagcagactttaagcactctttttgtggaatttgcaagtggagatttcagccgctttgaggtcaatggtagaaaaggaaatatcttcgtataaagactagacagaatgattctcagaaactcctttgagatgtgtgtgttcaactcacagagtttaacctttcttttcatagagcagttaggaatcactctgtttgtaaagtctgcaagaggatattcagacctctttgaggcctttgttggaaacgggtttttttcatataaggctagacagaagaattctcagaaacttccttgtgttgtgtgtattcaactcacagagttgaacgatgctttacacagagtagacttgaaacactctttttctggaatttgcaagtggagatttcaggcgctttgaggtcaatggtagaaaaggaaatatcttcgtataaaaactagacagaatcattctcagaaactgctctgcgatgtgtgcgttcaactctcagagtttaacatttcttttcattcagcagtttggaaacactctgtttgtaaagtctgcacgtggataacttgaccacttagaggccttcgttggaaacgggtttttttcatgtaaggctagacagaagaattcccagtaacttccttgtgttgtgtgcattcaactcacagagttgaacgttcccttagacagagcaggatttgaaacactctatttgtgcaatttgcaagtgtagatttcaagcgctttaaggtcaatggcagaaaaggaaatatcttcgtttcaaaactagacagaatcattcccacaaactgcgttgtgatgtgttcgttcaactcacagactttaacctttctgttcatagagcagttaggaaacactctgtttgtaaagtctgcaagtggatattcagacctccttgaggccttcgttggaaacgggatttcttcatattctgctagacagaagaattctcagaaacttccttgtgttgtgtgttttcaactcacagagttgaacgatcctttacacagagcagacttgaaacactctttttgtggaatttgcaagtggagatttcagccgctttgaggtcaatggtaaaataggaaatatcttcctatagaaactagacagaatgattctcagaaacttctttgtgatgtgtgcgttcaactcacagagtttaacctttctgttcatagagcagttaggaaacactctgtttgtaaactctgcaagtggatattcagacctctttgaggccttcgttggaaacgggatttctccatactgtgctagacagaagaattcccagtaacttccttgtgttgtgtgtgttcgactcacagagttgaactttcatttacacagagcagatttgaaacactctttttgtggaatttgcaaatggagatttcaagcgctttgagtccaaaggcagaaaaggaaatatcttcgtataaaaactagacagaatcattctcagaaactgctctgcgatgtgtgcgttcaactctcagagtttaacttttcttttcattcagcagtttggaaacactctgtttgtaaagtctgcacgtggatattttgaccacttagaggccttcgttggaaacgggtttttttcctgtaaggctagacagaagaattcccagtaacttccttgtgttgtgtacattcaactcacagagttgaacgttcccttagacagagcagatttgaaacactctttttgtgcaattggcaagtggagatttcaagcgctttaaggtcaatggcagaaaaggaaatatcttcgtttcaaaactagacagaatcattcccacaaactgcgttgtgatgtgttcgttcaactcacagagtttaacctttcttttcatagagcagttaggaaacagtctgtttgtcaattctgtaagtggatattctgacatcttgtggccttcgatggaaacgggttttcttcatattctgctagacagaagaattctcagaaacttccttgtgttgtgtgtattcaactcacagagttgaacgatcgtttacacagagcagacttgagacactctttttgtggaatttgtaagtggagatttcagccgctttgaggtcaatggtagaaaaggaaatatcttcatataaaaactagacagaatgattctcagaaactcctttgtgatgtgtgtgttcaactcacagagtttaacctttctttccgtagagcagttaggaaacactctgtttgtaaagtctgcaagtggatattcagacctccttgaggccttcgttggaaatgggatttcttcatattctgctagacagaagaattcccagtaacttccttgtgttgtgtgtgttcaactcacagagttgaactttcatttacacagagcagatttgaaacactctttttgtggaatttgcaagtggagatttcaagcgctttgaggcgaaaggcagaaaaggaaatatcttcgtataaaaactagacagaatcattctcagaaactgctgcgtgacgtgtgccttcaactctcagagtttaacttttcttttcattcagcggtttggaaacactctgtttgtaaagtctgcacgtggatattttgaccacttagaggccttcgttggaaacgggattttttcatgtaaggctagacagaagaattcccagtaacttccttgtgttgtgtgcattcaactcacagagttgaacgttcccttagacagagcagatttgaaacactctatttgtgcaatttgcaagtgtagatttcaagcgctttaaggtcaatggcagaaaaggaaatatcttcgtttcaaaactagacagaatcattcccagaaactgcgttgtgatgtgttcgttcaactcacagagtttaacctttctgttcatagagcagttaggaaacactctgtttgtaaagtctgtaagtggatattctgacgtcttgtggccttcgttggaaacgggatttcttcatattctgctagacagaagaattctcagtaacttccttgtgttgtgtgtattcaactcacagagttgaacgatcatttacacaaagcagacttgaaacactctttatgtggaatttgcaagtggagatttcagccgctttgaggttaatggtagaaaatgaaatgtcttcgtatagaaactagacagaatgattctcagaaactcctttgtgatgtgtgcgttcaactcacagagtttaacctttcttttcatagagcagttaggaaacactctgtttgtaaagtctgcaagtggatattcagacctccttgaggccttcgttggaaacgggatttcttcctattatgctagacagaagaattcccagtaacttccttgtgttgtgtgtgttcaactcatagagttgaactttcatttacacagagcagatttgaaacactctttttgtggaatttgcaagtggagatttcaagcgctttgaggccaaaggcagaaaaggaaatatcttcgtataaaaactagacagaatcattctcagaaactgctgcgtgatgtgtgcgttcaactctcggagtttaacttttcttttcattcagcggtttggaaacactctgtttgtaaagtctgcacgtggatattttgaccacttagaggccttcgttggaaacgggtttttttcatgtaaggctagacagaagaattcccagtaacttccttgtgttgtgtgcattcaactcacagagttgaacgttcccttagacagagcagatttgaaacactctatttgtgcaatttgcaagtgtagatttcaagcgctttaaggtcaatggcagaaaaggaaatatcttcgtttcaaaactagacagaatgattctcagaaactcctttgtgatgtgtgcgttcaactcacagagtttaacttttcttttcatagagcagttaggaaactctctgtaaagtctgcaagtgcatattcagacctctttgaggccttcgttggaaacgggatttcttcatattatgctagacagaataattctcagtaacttccttatgttgtgtgtattcaactcacagagttgaacgatcctttacagagagcagacttgaaacactctttttgtggaattcgcaagtggagatttcagccgctttgaggtcaatggtagaaaaggatatatcttcgtataaagactagacagaatgattctcagaaactcctttgtgatgtgtgcgttcaactcacagagtttaacctttcttttcatagagcagttaggaaacactctgtttgtaaagtctgcaagttgatattcagacctctttgaggccttcgttggaaaggggatttcttcatattctgctagagagaagaattctcagtaacttcccttgtgttgtgtgtattcaactcacagagttgaacgatcctttacacagagaagacttgaaacactctttttgtggaatttgcaagtggagatttcagccgctttcaggtcaatagtagaaaaggaaatatcttcgtagaaaaactagacagaatcattctcagaaactgctctgcgatgtgtgcgttcaactctcagagtttaacttttcgtttcattcagcagtttggaaacactctgtttgtaaagtctgcacgtggatattttgaccacttagaggccttcgttggaaacgggtttttctcctgtaaggctagacagaagaattcccagtaacttccttgtgttgtgtacattcaactcacagagttgaacgttcccttagacagagcagatttgaaacactctttttgtgcatttggcaagtggagatttcaagcgctttgaggtcaatggcagaaaaggaaatatcttcgtttcaaaactagacagaatcattcccacaaactgcgttgtgatgtgttcgttcatctcacagagtttaacctttcttttcatagagcagttaggaaacactctgtttgtaaattctgtaagtggatattctgacatcttgtggccttcgttggaaacgggatttcttcatattctgctagacagaagaattctcagtaacttccttgtgttgtgtgtattcaactcacagagttgaacgatcctttacacagagcagacttgaaacactctttttctggaatttgcaagtggagatttcagccgctttgaggtcaatggtagaataggaaatatcttcttatagaaactagacagaatgattctcagaaacttcattgtgatgtgtgcgttcaactcacagagtttaacctttcttttcatagagcagttaggaaacactctgtttgtaaactctgcaagtggatattcagacctctttgaggccttcgttggaaaggggatttctccatactgtgctagacagaagaattcccagtaacttccttgtgttgtgtgtgttcaactcacagagttgaactttgatttacacagagcagatttgaaacactctttttgtggaatttgcaagtggagatttcaagcgctttgaggccaaaggcagaaaaggaaatatcttcgtataaaaactagacagaatcattctcagaagctgctctgcaatgtgtgcgttcaactctcagagtttaacttttcttttcattcagcagtttggaaacactctgtttgtaaagtctgcacgtggatattttgaccacttagaggccttcgttggaaacgggtttttttcctgtaaggctagacagaagaattcccagtaacttccttgtgttgtgtacattgaactcacagagttgaacgttcccttagacagagcagatttgaaacactctttttgtgcaattggcaagtggagatttcaagggctttaaggtcaatggcagaaaaggaaatatcttcgtttcaaaactagacagaatcattcccacaaactgcgttgtgatgtgttcgttcaactcacagagtttaacctttcttttcatagagcagttaggaaacagtctgtttgtaaattctgtaagtggatattctgacatcttgtggccttcgttggaaacgggatttcttcatattctgctagacagaagaattctcagtaacttccttgtggagttgtgtgtattcaactcacagagttgaacgatcctttacacagagcagacttgaaacattctttttctggaatttgcaagtggagatttcagccgctttgaggtcaatggtagaataggaaatatcttcctatagaaactagacagaatgattctcataaactcctttgtgatgtgtgcgttcaactcacagagtttaacctttcttttcatagagcagttaggaaacactctgtttgtaaagtctgcaagtggatattcagacctccttgaggccttcgttggaaacgggatttcttcatattctgctagacagaagaattctcagtaacttccttgtgttgtgtttattcaactcacagagttgaatgatcgtttacacagagcagacttgaaacactctttttgtggaatttgcaagtggagatttcagccgctttgaggtcaatggtagaaaagtaaatatcttcgtataaagactagacagaatgattctcagaaactccttagtgatgtgtgcgttcaactcacagagtttaacctttctgttcatagagcagttaggaaacactctgtttgtaaagtctgcaagtggatattcagacccctttgaggccttcgttggaaacgggatttcttcatattatgctagacagaagaattcccagtaacttccttgtgttgtgtacattcaactcacagagttgaacgttcccttagacagagcagatttgaaacactctttttgtgcaattggcaagtggagatttcaagcgctttaaggtcaatggcagaaaaggaaatatcttcgtttcaaaactagacagaatcattcccacaaactgcgttgtgatgtgttcgttcaactcacagagtttaacctttcttttcatagagcagttaggaaacactctgtttgtaaatgtctgcaagtggatattcagacctccttgaggccttcattggaaacgggatttcttcatattctgctagacagaagaattctcagtaacttccttgtgttgtgtgtattcaactcacagagttgaacgatcctttacacagagcagacttgaaacactctttttgtggaatttgcaagtggagatttcagccgctttgagttcaatggtagaataggaaatattttcctatagaaactagacagaatgattctcagaaattcctttgtgatgtgtgcgttcaactcacagagtttaacctttcttttcatagagcagttaggaaacactctgtttgtaaagtctgcaagtggatattcagacctccttgaggccttcgttggaaacgggatttcttcatattatgctagacagaagaattcccagtaacttccttgtgttgtgtgtgttcaactcacagagttgaacgttcattaacacagagcagatttgaaacactctttttgtggaatttgcaaatggagatttcaagcgctttggggccaaaggcagaaaaggtaatatcttcgtttcaaaactagacagaatcattctcagaaactgctctgcgatgtgtgcgttcaactctcagagtttaacttttcttttcattcagcagtttggaaacactctgtttgtaaagtctgcacgtggataatttgaccacttagaggccttcgttggaaacgggtttttttcatgtaaggctagacagaagaattctcagtaacttccttgtgttgtgtgtattcaactcacacagctgaacgatcctttacacagagcagacttgtaacactctttttgtggaatttgcaagtggagatttcagccgctttgaagtcaaaggtagaaaaggaaatatcttcctataaaaactagacagaatcattcccacaaactgcgttgtgatgtgttcgttcaactcacagagtttaacctttctgttcatagagcagttaggaaactctctgtttctaaagtctgtaagtggatattctgacatcttgtggccttcgttggaaacgcgatttcttcatattctgctagacagaagaattctcagaaacttccttctgttgtgtgttttcaactcacagagttgaacgatgctttacacagagtagacttgaaacactctttttgtgtaatttgcaagtggagatttcagccgctttgaggtcaatggtagaaaaggaaatatcttcgtataaaaacaagacagaacgattctcagaaactcctttgtgatgtctgcgttcaactcacagagtttaacctttcttttcatagagcagttaggaaacactctgtttgtaaagtctgcaagtggatattcagacctctttgaggccttcgttggaaacgggtttttttcatgtaaggctagacagaagaattcccagtaacttccttgtgttgtgtgtgttcaactcacagagttgaactttcatttacacagaccagatttgaaacactctttttgtggaatttgcaagtggagatttcaagcgctttgaggccaaaggcagaaaaggaaatatcttcgtataaaaactagacagaatcattctcagaaactgctctgcgatgtgtgcgttcaactctcagagtttaacttttcttttcattcagcagtttggaaacactctgtttgtaaagtctgcacgtggatattttgaccacttagaggccttcgttggaaacgggtttttttcctgtaaggctagacagaagaattcccagtaactttccttgtgttgtgtacattcaactcacagagttgaacgttcccttagacagagcagatttgaaacactctttttgtgcaattcgcaaatggagatttcaagcgctttaagttcaatggcagaaaaggaaatatcttcgtttcaaaactagacagaatcattcccacaaactgcgtattgatgtgttcgttcaactcacagagtttaacctttcttttcatagagcagttaggaaacactctgtttgtaaattctgtaagtggatattctgaaatcttgcggccttcgttggaaacgggctttcttcatattctgctagacagaataattctcagtaacttccttgtgttgtgtgtattcaactcacagagttgaaggatcctttacagagagcaggcttgaaacactctttttgtcgaatttgcaagtggagatttcagccgctttgaggtcaatggtagaataggaaatatcttcttatagaaactagacagaatgattctcagaaactcccttgtgatgtgtgcgttcaactcacagagtttaacctttcttttcatagagcagttaggaaacactctgtttgtaaactctgcaagtggatattcagacctctttgaggccttcgttggaaacgggatttcttcatattatgctagacagaagaattcccagtaacttccttgtgttgtgtgtgttcaactcacagagttgaactttcatttacacagagcagatttgaaacactctttttgtggaatttgcaagtggagatttcaagcgctttgaggccaaaggcagaaaaggaaatatcttcgtatgaaaactagacagaatcattctcagaaactgctctgcgatgtgtgcgttcaactctcagagtttaacttttcttttcattcagcagtttggaaacactctgtttgtaaagtctgcgcgtggataatttgaccacttagaggccttcgttggaaacgggtttttttcatataaggctagacagaagaattcccagtaacttccttgtgttgtgtgcattcaactcacagagttgaacgttcccttagacagagcagatttgaaacactctatttgtgcaatttgcaagtgtagttttcaagctctttaaggtcaacggcagaaaaggaaatatcttggtttcaaaactagacagaatcattcccacaaactgcgttgtgctgtgttcgttcaactcacagagtttaacctttctgttcatagagcagttaggaaacactctgtttgtaaagtctgtaagtggatattcagacatcttgtggccttcgttggaaacgggatttcttcatattctgctagacagaggaattcccagtaacttccttgtgttgtgtgcattcaactcacagagttgaatgattctttacacagagcagatttgagacactcttttggtggaatttgtaagtggagaattcagccgctttgaggtcaatggtagaaaaggaaatatcttcgtataaaaactagacagaatgattctcagaaactcctttgtgatgtgtgcgttcaactcacagagtttaacttttcttttcatagagcagttaggaaacactctgtttgtaaagtctgcaagtggatattcagacctctttgaggccttcgttggaaacgggatttcttcctattctgctagacagaagaattctcagtaacttccttgtgttgtgtgtattcaactcacagagttgaacgatcctttacacagagcagacttgaaacactctttttgtggaatttgcaagtggagatttcagccgctttcaggtcaatggtagaataggaaatatcttcatatagaaactagacagaatgattctcagaaactcctttgtgatgtgtgcgttccactcacacagtttaacctttcttttcatagagcagttaggaaacactctgtttgtaaagtctgcaagtggatattcagacctccttgaggcattcgttggaaacgggatttcttcatattatgctagacagaagaattcccagtaacttccttgtgttgtgtacattcaactcacagagttgaacgatcccttagacagagcagatttgaaacactctttttgtggaatttgcaaatggagatttcaagcgctttgaggccaaaggcagaaaaggaaatatcttcgtataaaaactagacagaaatgattctcagaaactcctttgtgatgtgtgcgttcaactcacagagtttaacctttcttttcatagagcagttaggaaacactctgtttgtaaagtctgcaagtggatattcagacctctttgaggccttcgttggaaacgggttttcttcatattctgctagacagaagaattctcagtaacttccttgtgttgtgtgtattcaactcacagagttgaacgatcctttacacagagcagtcttgaaacactctttttgtggaatttgcaagtggagatttcagccgctttgaggtcaatagtagaaaaggaaatatcttcgtagaaaaactaggcagaatgattctcagaaactcctttgtgatgtgtgcgttcaactcatagagtttaacctttcttttcatagagcagttaggaaacactctgtttgtaaagtctgcaagtggatattcagacctctttgaggccttcgttggaaacgggatttcttcatattctgctagacagaataattctcagtaacttccttgtgttgtgtgtattcaactcacagagttgaacgatcctttacagagagcagacttgaaacactctttttgtggaatttgcaagtggagatttcagccgctttgaggtcaatagtagaaaaggaaatatcttcgtagaaaaactagacagagtgattctcagaaactcctttgtgatgtctgcgttcaactcacagagtttaacctttcttttcatagagcagttaggaaacactctgtttgaaaagtctgcaagtggatattcagacctccttgaggccttcgttggaagcgggatttcttcatattctgctatacagaagaattctcagaaacttccttgtgttgtgtgtattcaactcacagagttgaacgatcgtttacacagagcagacttgagacactcttttttggaatttgtaagtggagatttcagccgctttgaggtcaatggtagaaaaggaaatatcttcacataaaaactagacagaatgattctcagaaactcctttgtgctgtgtgcgttcaactcacagagtttaacctttcttttcatagagcagttaggaaacactctgtttgttaagtctgcaggtggatattcagacctctttgaggccttcgttggaaacgggatttcttcatattatgctagacagaagaattctcagtaacttccttgtgttgtgtgtattcaactcacagagttgaacgatcctttacacagagcagacttgaaactctctttttgtggaatttgcaagtggagatttcagccgctttgaggtcaatagtagaaaaggaaatatctttcgtagaaaaactagacagaatgattctcagaaactcctttgggatgtgtgtgcccaactcacagagtttaacctttcttttcatagagctgttaggaaacactctgtttgtaaagtctgcaagaggatattcagacctctttgaggccttcgttggaaacgggtttttttcatataaggctagacagaagaattcccagtaacttccttgtgttgtgtgtgttcaactcacagagttgaactttgatttacacagagcagatttgaaacactctttttgtggaattttcaagtggagatttcaagcgctttgaggccaaaggcagaaaaggaaatatcttcgtataaaaactagacagaatcattctcagaaactgctgcgtgatgtgtgccttcaactctcagagtttaacttttcttttcattcagcggtttggaaacactctgtttgtaaagtctgcacgtggaaattttgaccacttagaggccttcgttggaaacgggtttttttcatgtaaggctagacagaagaattctcagtaacttccttgtgttgtgtgtattcaactcacagagttgaacgatcctttacacagagcagacttgaaacacactttttgtggaatttgcaagtggagatttcagccgctttgaggtcaatggtagaataggaaatatcttcttatagaaactagacagaatgatctcagaaactcctttgtgatgtgtgccttcaactcacagagtttaacctttcttttcatagagcagttaggaaacactctgtttgtaaagtctgcaagtggatattcagacctctttgaggccttcgttggaaacgggatttcttcatattctgctagacagaagaattctcagtaacttccttgtgttgtgtgtattcaactcacagagttgaacgatcctttacacagagcagacttgaaacactctttttgtggaatttgcaagtggagatttcagccgctttgaggtcagtagtagaaaaggaaatatcttcgtagaaaaactagacagaatgattctcagaaactcctttgtgatgtgggcgttgaactcacagagtttaacctttcttttcatagagcagttaggaaacactctgtttgtaaagtctgcaagtggatattcagacctctttgaggctttcgttggaaacgggatttcctcatattctgctagacagaagaattcccagtaacttccttgtgttgtgtgtgttcaactcacagagttgaactttcatttacacagagcagatttgaaacactctttttgtggaatttgcaaatggagatttcaagcgctttgaggccaaaggcagaaaaggaaatattctttgtataaaaactagacagaaccattctcagaaactgctctgcgatgtgtgcgttcaactctcagagtttaacttttcttttcattcagcagtttggaaacactctgtttgtaaagtctgcacgtggataatttgaccacttagaggccttcgttggaaacgggtttttttcatgtaaggctagacagaagaattcccagtaacttccttgtgttgtgtgcattcaactcacagagttgaacgttcccttagacagtgcagatttgaaacactctatttgtgcaatttgcaagtgtagatttcaagcgctttaaggtcaatggcagaaaaggaaatatcttcgtttcaaaactagacagaatgattctcagaaactcctttgtgatgtgtgcgttcaactcacagagttcaacctttcttttcatagagcagttaggaaacactctgtttgtaatgtctgcaagtggatcttcagacctctttgaggccttcgttggaaacgggttttcttcatattatgctagacagaagaattctcagtaacttccttgtgttgtgtgtattcaactcacagagttgaacgatcctttacacagagcagacttgaaacactctttttgtggaatttgcaagtggagatttcagccgctttgaggtcaatggtagaataggaaatatcttcctataaaaactagacagaatgattctcagaaaatcttttgtgatgtgtgcgttcaactcacagagtttaacttttcttctcatagagcagttaggaaacactctgtttgtaaagtctgcaagtggatattcagacctctttgaggtcttcgttggaaacgggatttcttcatattatgctagacagaagaattctcagtaacttccttgtgttgtgtgtattcaactgacagagttgaacttttatttagagagagcagatttgaaactctgtttttgtggaatttgcaagtggagatttcaagcgctttggggccaaaggcagaaaaggaaatatcttcgtataaaaactagacagaatcattctcagaaactgctgggtgatgtgtgcgttcaactctcagagtttaacttttcttttcattcagcggtttggaaacactctgtttgtaaagtctgcacgtggatattttgaccacttagaggccttcgttggaaacgggttttttgcatgtaaggctagacagaagaattcccagtaacttccttgtgttgtgtacattcaactcacagagttgaacgttcccttagacagagcagatttgaaacactctttttgtgcaattggcaagtggagatttcaagcgctttaaggtcaatggcagaaaaggaaatatcttcgtttcaaaattagacagaatgattctcagaaactcctttgtgatgtgtgcgttcaactcacagagttcaacctttcttttcatagagcagttgggaaacactctctttgtaaagtctgcaagtggatattcagacttctttgaggccttcgttggaagcgggatttcttcatattctgctagacagaagaattctcagtaacttccttgtgttgtgtgtattcaactcacagagttgaacgatcctttacacagagcagacttgaaacactctttttgtggaatttgcaagtggagatttcagccgctttgaggtcaatggtagaataggaaatatcttcctatagaaactagccagaatgattctcagaaactcctttgtgatttgggtgttcaactcacagagtgtaacctttcttttcatagagcagttaggaaacactctgtttgtaaagtctgcaagtggatatttttacctctttgaggccttcgttggaaacgggtttttttcatgtaaggctagacagaagaattctcagtaacttccttgtgttgtgtgtattcaactgacagagttgaactttcatttagagagagcagatttgaaacactctttttttggaatttgcaagtggagatttcaagcgctttgaggccaaaggcagaaaaggaaatatcttcgtataaaaactagacagaatcattctcagaaactgctctgcgatgtgtgcgttcagatctcagagtttaacttttcttttcattcagcagtttggaaacactctgtttgtaaagtctgcacgtggatattttgaccacttagaggccttcgttggaaacgggattttgtcatgtaaggctagacagaagaattcccagtaacttccttgtgttgtgtacattcaactcacagagttgaacgttcccttatacagagcagatttgaaacactctttttgtgaaattggcaagtggagatatcaagcgctgaaggtcaatggcagaaaaggaaatatcttcgtttcaaaactagacagaatcattcccacaaactgcgttgtgatgtgttcgttcaactcacagagtttaacctttcttttcatagagcagttaggaaacagtctgtttgtcaattctgtaagtggatattctgacatcttgtggccttcgttggaaacgggattttttcatattctgctagacagaagaattctcagtaacttccttgtgttgtgtgtattcaactcacagagttgaacgatcctttacagagagcagacttgaaacactctttttgtggaatttgcaagtggagatttcagccgctttgaggtcaatggtagaataggaattatcttcctatagaaactagacagaatgattctcagaaactcctttgtgatgtgtgcgttgaactcacagagtttaaccttgcttttcatagagcagttaggaaacactctgtttgtaatgtctgcaagtggatattcagacctccttgaggccttcgttggaaaagggatttcttcatattatgctagacagaagaattctcagaaacttccttgtgttgtgtgttttcaactcacagagttgaacgatcctgtacacagagcagacttgaaacactctttttgtggaatttgcaagtggagatttcagccgctttgaggtcaatggtagaataggaaatatcttcctatagaaactagacagaatcattctcagaaactgctctgcgatgtgtgcgttcaactctcagagtttaacttttcttttcattcagcagtttggaaacactctgtttgtaaagtctgcacgtggatattttgaccacttagaggccttcgttggaaacgggtttttttcctgtaaggctagacagaagaattctcagtaacttccttgtgttgtgtacattcagctcacagagttgaacgttcccttagacagagcagatttgaaacactctttttgtgcaattggcaagtggtgatttcagccgctttgaggtcaatggtagaaaaggaaatatcttcgtataaaaactagacagaatcattcccacaaactgcgttgtgatgtgttcgttcaactcacagagtttaacctttcttttcatagagcagttaggaaacagtctatttgaaaattctgtaagtggatattctgacatcttgtggccttcgttggaaacgggatttcttcatattctgctagacagaagaattctcactaacttccttgtgttgtgtgtattcaactcacagagttgaacgatcctttacacagagcggacttgaaacactcattttgtggaatttgcaagtggagatttcagccgcgttgaggtcaatggtagaaaaggaaatatcttcgtataaaaactagacagaatgattctcagaaactcctttgtgatgtgtgtgttcaactcacagagtttcacctttcttttcatagagcagataggaaacactctgtttgtaaagtctgcaagtggatattcacacctctttgaggccttcgttggaaacgggtttttttcatataaggctagacagaagaattcccagtaacttcccttgtgttgtgtgtgttcaactcacagagttgaactttcatttacacagagcagatttgaaacactctttttgtggaatttgcaaatggagatttcaagcgctttgaggccaaaggcagaaaaggaaatatcttcgtttcaaaactagacagaatcattctcagaaactgctctgcgatgtgtgcgttcaactctcagagtttaacttttcttttcattcagcagtttggaaacactctgtttgtaaagtctgcacgtggatattttgaccacttagaggccttcgttggaaacgggttttttcctgtaaggctagacagaagaattcccagtaacttccttgtgttgtgtacattcaactcacagagttgaacgttcccttagaaagagcagatttgaaacactctttttgtgcaattggcaagtggagatttcaagcgatttaaggtcaatggcagaaaaggaaatatcttcgtttcaaaactagacagaatgattctcagaaactcctttgtgatgtgtgcgttcaactcacagagtttaacctttctgttcatagagcagttaggaaacactctgtttgtaaagtctgcaagtggatattcagacctctttgaggccttcgttttaaacgggatttcttcatattatgctagacagaataattctcagtaacttccttgtgttgtgtgtattcaactcacagagttgaacgatcctttacacagagcagacttgaaacactctatttgtagaatttgcaagtggagatttcagccgctttgaggtcaatagtagaaaaggaaatatcttcgtagaaaaactagacagaatgattctcagaaactcctttgtgatgtgtgcattcaactcacagagtttaacctttcttttcatagagcagttaggaaacactctgtttgtaaagtctgcaactggatattcagacctctttgaggccttcgttggaaacgggatttcttcatattatgctagacagaagaattctcagtaaattccttgttttgtgtgtattcaactcacagagttggacgatcctttacacagagcaaacttgaaacactctttttgtggaatttgcaattggagatttcagccgctttgaggtcaattgtagaaaaggaaatatcttcgtataaaaactagacagaatgattctcagaaactcccttgtgatgtgcgcgttcaactcacagagtttaacctttcttttcatagagcagttaggaaacactcagtttgtaaagtctgcaagtggatattcagacctccttgaggccttcgttggaaacgggatttcttcatattatgctagacagaagaattcccagtaacttccttgtgttgtgtacattcaactcacagagttgaacgttcccttagacagagcagatttgaaacactctttttgtgcaattggcaaatggagatttcaagcgctttaaggtcaatggcaggaaaggaaatatcttcgtttcaaaactagacagaatcattcccacaaactgcgttgtcatgtgttcgttcaactcacagagtttaacctttcttttcatagagcagttaggaaacagtctgtttgtaaattctgtaagtggatattctgacatcttgtggccttcgttggtaacgggatttcttcatattctgctagacagaataattctcagtaacttccttgtgttgtgtgtattcaactcacagatttgaaggatcctttacagagagcaggcttgaaacactcttcttctcgaatttgcaagtggagatttcagccgctttgaggtcaatggtagaaaagtaaatatcttcgtataaagacgagacagaattattctcagaaactcctttgtgatgtgtgcgttcaactcacagagtttaacctttcttttcatagagcagttaggaaacactctgtttgtaaagtctgcaagtggatattcagacatctttgaggctttcgttgaaaacgggatttcttcatattatgctagacagaagaattcccagtaacttccttgtgttgtgtgtgttcaactcacagagatgaactctcatttacacagagcagatttgaaactctctttttgtggaatttgcaaatggagatttcaagcgctttgaggccaaaggcagaaaaggaaatatcttcgtataaaaactagacagaatcattctcagaaactgctgcgtgatgtgtgcgttcaactctcagagtttaacttttcttttcattcagcggtttggaaacactctgtttgtaaagtctgcacgtggaaattttgaccacatagaggccttcgttggaaacgggtttttttcatgtaaggctagacagaagaattcccagtaacttccttgtgttgtgtgcattcaactcacagagttgaacgttcccttagacagagcagatttgaaacactctatttgtgcaatttgcaagtgtagatttcaagcgctttaaggtcaatggcagaaaaggaaatatcttcgtttcaaaactagacagaatgattctcagaaactccttcgtgatgtgtgcgttcaactcacagagtttaacctttcttttcatagagcagttaggaaacactctgtttgtaaagtctgcaagtggatattcagacctctttgaggccttcgttggaaacgggatttcttcatattctgctagacagaagaattctcagtaacttccttgtgttgtgtgtattcaactcacagagttgaacgatcctttacacagagcagacttgaaacactctttttgtggaatttgcaagtggagatttctgccgctttgaggtcaatggtagaataggaaatatcttcctatagaaactagacagaatgattctcagaaacttctttgtgatgtgtgtgttcaactcacagtgtttaacctttcttttcatagagcagttaggaaacactgtgtttttaaactctgcaagtggatattcagacctctttgaggccttcgttggaaacgggtttcttcatactgtgctagacagaagaattctcagtaacttaccttgtgttgtgtgtattcaactcacagagttgaacgatcctttacacagagcagacttgtaacactctttttgtggaatttgcaagttgagatttcagccgctttgaagtcaaagatagaaaaggaaatatcttcctataaaaactagacagaatgattctcagaaactcctttgtgatgtgtgcgttcaactcacagagtttaacttttcttttcatagagcagttaggaaacactctgtttgtaaagtctgcaagtggatattcagacctctttgaggccttcgttggaaacgggatttattcatattctgctagacagaagaattcccagtaacttccttgtgttgtgtgcattcaactcacagagttgaacgttcccttagacagaggagatttgaaacactctatttgtgcaatttgcaagtgtagatttcaagcgctttaaggtcaatggcagaaaaggaaatatcttcgtttcaaagctagacagaatcattcccacaaactgcgttgtgatgtgttcgttcaactcacagagtttaacctttctgttcatagagcagttaggaaacactctgtttgtaaagtctgcaagtggatattcagacctccttgaggccttcgttggaaactggatttcttcatattctgctagacagaagaattctcagtgacttccttgtgttgtgtgtattcaactcacagagttgaacgatcctttacacagagcagacttgaaacactctttttgtggaatttgcaagtggagatttcagccgctttgaggtcaatggtagaataggaaatatcttcctatagaaactagacagaatgattctcagaaactcctttgtgatgtgtgtgttcaactcacagagtttaacctttcttttcatagagcagttaggaaacactctgtttgtaaagactgcaagtggatattcaggcctctttgaggccttcgttggaaacgggtttttttcatataaggctagacagaagaattctcagtaacttcccttgtgttgtgtgtattcaactgacagagttgaactttcatttggagagagcagatttgaaacactgtttttgtggaatttgcaagtggagatttcaagcgctttgcggccaaaggctgaaaaggaaatatcctcgtataaaaacaagacagaatcattctcagaaactgctctgtgatgtgtgcgttcaactctcagagtttaacttttcttttcattcagcagtttggaaacactctgtttgtaaagtctgcacgtggataacttgaccacttagaggccttcgttggaaacgggtttttttcatgtaaggctagacagaagaattcccagtaacttccttgtgttgtgtacattcaactcacagagttgaacgttcccatagacagagcagatttgaaacactctttttgtgcaattggcaagtggagatttcaagcgctttaaggtcaatggcagaaaaggaaatatcttcgtttcaaaactagacagaatcattcccacaaactgcgttgtgatgtgttcgttcaactcacagagtttaacctttcttttcatagagcagttaggaaacagtctgtttgtaaattctgtaagtggatattctgacatcttgtggccttcgttggaaacgggatttcttcatattctgctagacagaagaattctcagtaacttccttgtgttgtgtttattcaactcacagagttgaacgatcctttacacagagcagacttgaaacactctttttcttgaatttgcaagtggagatttcagccgctttgaggtcaatggtagaaaaggaaatatcttcgtataaagactagacagaatgattctcagaaacttcattgtgacgtgtgcgttcaactcacagagtttaacctttcttttcatagagcagttaggaaacactctgtttgtaaagtctgcaagtggatattcagacctctctgaggccttcgttggaaacgggatttcttcatactgtgctagacagaagaattctcagtaacttccttgtgttgtgtgtattcaactcacagagttgaacgatcctttacacagagcagacttgaaccattctttttgtggaatttgcaagtggagatttcagccgctttgaggtcaatggtagaataggaaatatcttcctatagaaactagacagaatcattctcagaaactgctctgcgatgtgtgcgttcaactctcagagtttaacttttcttttcattcagcagtttggaaacactctgtttgtaaagtctgcacgtggatattttgaccacttagaggccttcgttggaaacgggtttttttcctgtaaggctagacagaagaattcccagtaacttccttgcgttgtgtacattcaactcacagagttgaacgttcccttagacagagcagatttgaaacactctttttgtgcaattggcaagtggagatttcaagcgctttaaggtcaatggcagaaaaggaaatatcttcgtttcaaaactagacagaaatcattcccacaaactgcgttgtgatgtgttcgttcatctcacagagtttaacctttcttttcgtagagcagttaggaaacagtctgtttgtaaattctgtaagtggatattctgacatcttgtggccttcgttggaaacgggatttcttcatattctgctagacagaagaattctcagaatcttccttgtgttgtgtgtattcaactcacacagttgaacgattgtttacacagagcagatttgaaacactctttctgtggaatttgcaagtggagatttcagccgctttgaggtcaatggtagaaaaggaaatatcttcgtataaaaaactagacagaatgattctcagaaactcctgtgtgatgtgtgcgttcaactcacagagtttaacctttcttttcatagagcagttaggaaacactctgtttgtaaagtctgcaagtggatattcagacctctttgaggccttcgtgggaaacgggtttttttcatataaggctagacagaagaattcccagtaacttccttgtgttgtgtgtgttcaactcacagagttgaactttcatttacacagagcagatttgaaacactctttttgtggaatttgcaagtggagatttcaagcgctttgaggccaaaggcagaaaaggaaatatcttcttttgaaaactagacagaatcattctcagaaactgctctgcgatgtgtgcgttcaactctcagagtttaacttttcttttcattcagcagtttggaaacactctgtttgtaaagtctgcacgtggatattttgaccacttagaggccttcgttggaaacgggtttttttcctgtaaggctagacagaagaattcccagtaacttccttgtgttgtgtgcattcaactcacagagttgaacgttcccttagacagagcagatttgaaacactctatttgtgcaatttgcaagtgtagatttcaagcgcattaaggtcaatggcagaaaaggaaatatcttcgtttcaaaattagacagaatcattcccacaaactgcgttgtgatgtgttcgttcaactcacagagttttacctttctgttcatagagcagttaggaaacactctgtaaagtctgtaagtggatattctgacatcttgtggccttcgttggaaacgggatttcttcatattctgctagacagaagaattcccagtaacttccttgtgttgtgtgtgttcaactcacagagttgaactttcatttacacagagcagatttgaaacactctttttgtgcaattggcaagtggtgatttcagccgctttgaggtcaatggtagaaaaggaaatatcttcgtataaaaactagacagaatgattctcagaaactcctttgtgatgtgtgcgttcaactcacagagtttaacctttcttttcatagagcagttaggaaacactctgtttgtaaagtctgcaagtggatattcagacctctttgaggccttcgttggaaacgggttttattcatataaggctagacagaagaattcccagtaacttccttgtgttgtgtgtgttcaactcacagagttgaactttcatttacacagagcagatttgaaacactctttttgtggaatttgcaggtggagatttcaagcgctttgaggccaaaggcagagaaggaaatatcttcgtataaaacctagacagaatcattctcagaaactgctgcgtgatgtgtgcgttcaactctcagagtttaacttttcttttcattcagcggtttggaaacactctgtttgtaaagtctgcacgtggatattttgaccacttagaggccttcgttggaaacgggttttttttcatgtaaggctagacagaagaattctcagtaacttccttgtgttgtgtgtattcaactcacagagttgcacgatcctttacacagagcagacttgaaacactctttttgtggaatttgcaagtggagatttcagccactttgaggtcaatggtagaataggaaatatcttcctatagaaactagacagaatgattctcagaaactcctttgtgatgtgtgcgttcaactcacagaatttaacatttcttttcatagagcagttaggaaacactctgtttgtaaagtctgtaagtggatattcagacctctttgaggccttcgttggaaacgggatttcttcgtattctgctagacagaagaattctcagtaacttccttgtgttgtgtgtattcaactcacagagttgaacgatcctttacagagagcagacttgaaacactctttttgtggaatttgcaagtggagatttcagccgctttgaggtcaatggtagaataggaaatatcttcgtagaaaaactagacagaatgattctcagaaactcccttgtgatgtgtgcgttcaactcacagagtttaacctttcttttcatagagcagttaggaaacactctgtttgtaaagtctgcaagtggatattcagacctccttgaggccttcgttggaaacgggatttcttcatattatgctagacagaagaattctcagtaccttccttgtgttgtgtgtattcaactcacagagttgaacgatcctttacacagagcatacttgaaacactcttgttgtggaatttgcaagtggagatttcagccgctttgaggtcaatggtagaataggaaatatcttcctatagaaactagacagaatgattctcagaaactcctttgtgatgtgtgcgttgaactcacagggtttaacctttcttttcatagagcagttaggaaacactctctttgtaaagtctggaagtggatattcagacctccttgaggccttcgttggaaacgggatttcttcatattatgctagacagaagaattcccagtaacttccttgtgttgtgtacattcaactcacggagttgaacgttcccttagacagagcagatttgaaacactctttttgtgcaattggcaaatggagatttcaagcgctttaaggtcaatggcagaaaaggaaatatcttcgtttcaaaactagacagaatcattcccacaaactgcgttgtgatgtgttcgttcaactcacagagtttaacctttcttttcatagaacagttaggaaacagtctgtttgtaaattctgtaagtggatattctgatatcttttggccttcgttggaaacgggatttcttcatattctgctagacagaagaattctcagtaacttccttgtgttgtgtgtattcaactcacagagttgaacgatcctttacacagagcagacttgaaacactctttttgtggaatttgcaagtggagatttcagccgctttgaggtcaatggtagaaaaggaaatatcttcgtataaagactagacagaatgattctgagaaactcctttctgatgtgtgcgttcaactcacagagtttaacctttcttttcatagagcagttaggaaacactctgtttgtaaagtctgcaagtggatattcagacctccttgaggccttcgttggaaacgggatttcttcatattatgctagacagaagaattcccagtaacttccttgtgttgtgtgtgttcatctcacagagttgaactttcatttacacagagcagatttgaaacactctttttgtggaatttgcaggtggagatttcaagcgctttgaggccaaaggcagaaaaggaaatatcttcgtataaaaactagacagaatcattctcagaaactgctctgcgatgtgtgcgttcaactctcagagtttaacttttcttttcattcagcagtttggaaacactctgtttgtaaagtctgcacgtggatattttgaccacttagaggccttcgttggaaacgggtttttttcctgtaaggctagacagaagaattcccagtaacttccttgtgttgtgtacattcaactcacagagttgaacgtttccttagacagagcagatttgaaacactctttttgtgcaattggcaagtggagatttcaagcgctttgaggtcaatggcagaaaaggaaatatcttcgtttcaaaactagacaaaatcattcccacaaactgcgttctgatgtgttcgttcaactcacagagtttaacctttctgttcatagagcagttaggaaacactctgtttgtaaagtctgtaagtggatattctgacatcttgtggccttcgttggaaacgggatttcttcatattctgctagacagaagaattctcagtaacttccgcgtgttgtgtgtattcaactcacagagctgaacgatcctttacacagagtagacttgaaacactctttttgtggaatttgcaagtggagatttcagccgctttgaggtcaatggtagaaaaggaaatatcttcctataaaaactagacagaatgattctcagaaactcctttgtgatgtgtgcgttcaactcacagagtttaacctttcttttcatagcgcagttgggaaacacactgtttgtaaagtctgcaagtggatattcagacatccttgaggctttcgttggaaacgggatttcttcatattctgctagaaagaagaattctcagtaacttccttgtgttgtgtgtattcaactcacagagttgaacgatcctttacagagagcagacttgaaacactctttttgtggaatttgcaagtggagatttcagccgcttttctggtcaatggtagaataggaaatatcttccaatagaaactagacagaatgattctcagaaactcctttgtgatgtgtgcgttcaactcacagagtttaacttttcttttcatagagcagtaaggaaacactctgtttgtaaagtctgcaagtggatattcagacctctttgaggccttcgttggaaacgggatttcttcatattctgctagacagaagaattcccagtaacttccttgtgttgtgtgcattcaactcacagagttgaacgttcccttagacagagaagatttgaaacactctatttgtgcaatttgcaagtgtagatttcaagcgctttaaggtcaacggcagaaaaggaaatatcttcgtttcaaaaccagacagaatcattcccacaaactgcgttgtgatgggttcgttcaactcacagagtttaacctttccgttcatagagcagttaggaaacacactgtttgtaaagtctgtaagtggatattctgacatcttgtggccctcgttggaaacgggatttcttcatattctgctagacagaagaattctcagaatcttccttgtgttgtgtgtattcaactcacagagttgaacgatcctttacacagagcagacttgaaacactctttttgtggaatttgcaagtggagatttcagccgctttgaggtcccatggtagaaaaggaaatatcttcgtataaaaactagacagaatgattctcagaaacttctttgtgatgtgtgtgttcaactgacagagtttaacctttcttttcatagagcagttaggaaacactctgtttgtaaactctgcaagtggatattcagacctctttgaggccttcgttggaaacgggttttgttcatataaggctagacagaataattctcagtaacttccttgtgttgtgtttattcaactcacagagttgaatgatcctttacagagagcagacttgaaacactctttttgtggaatttgcaagtggagatttcagccgctttgaggtcaatggtagaaaagtaaatatcttcgtataaagactagacagaatcattctcagaaactgctctgcgatgtgtgcgttcaactctcagagtttaacttttcttttcattcagcagtttggaaacactctgtttgtaaagtctgcacgtggataatttgaccacttagaggccttcgttggaaacgggtttttttcatgtaaggctagacagaagaattcccagtaacttcattgtgttgtgtacattctactcacagagttgaacgttcccttagacagagcagatttgaaacactctttttgtgcaattggcaagtggtgatttcaaccgctttgaggtcaatggtagaaagggaaatatcttcgtattaaaactagacagaatcattcccacaaactgcgttgtgatgtgttcgttcaactcacagagtttaacctttctgttcatagagcagttaggaaaaactctgtttgtaaagtctgtaagtagatattctgacatcttgtggccttctttggaaacgggatttcttcatattctgctagacagaagaattctcagtaacttaccttgtgttgtgtgtattcaactcacagagttgaacgatcctttacacagagcagacttgaaacactctttttgtggaattttgcaagtggagatttcagccgctttgaggtcaatggtagaaaaggaaactatcttcatataaagactagacagaatgattctcaggaactcctttgtgatgtgtgagttcaactcacagagtttatcctttcttttcatagagcagttaggaaacactctgtttgtaaagtctgcaagtggatattcagacctctttgaggccttcgttggaaacgggatttcttcatattctgctagacagaagaattctcagtaacttccttgtgttgtgtgtattcaactgacagagttgaactttcatttggagagagcagatttgaaacactgtttttgtggaatttgcaagtggagatttcaagcgcttttgggccaaaggcagaaaaggaaatatcttcgtataaaaactagacagaatcattctcagaaactgctctgcgatgtgtgcgttcaactctcagagtttaacttttcttttcattcagcagtttggaaacactctgtttgtaaagtctgcacttggatattttgaccacttagaggccttcgttggaaacgggtttttttcctgtaaggctagacagaagaattcccagtaacttccttgtgttgtgtgcattcaactcacagagttgaacgttcccttagacagagcagatttgaaacactctatttgtgcaattggcaactgtagatttcaagcgtttaaggtcaatggcagaaaaggaaatatcttcgtttcaaaactagacagaatcattcccacaaactgcgttgtgatgtgttcgttcaactcacagagtttaacctttctgttcatagagcagttaggaaacactctgtttgtaaagtctgtaagtggatattctgacatcttgtggccttcgttggaaacgggatttcttcatattctgctagacagaaagaattctcagtaacttccttgtgttgtgtgtattcaactcacagtgttgaacgatcctttacacagagcatacttgaaacactctttttgtggaatttgcaagtggagatttcagccgctttgatgtcaatggtagaaaaggaaataacttcgtataaagactagacagatgattctcagaaactcctttgtgatgtgtgcgttcaactcacagagtttaacctttcttttcatagagcagttaggaaacactctgtttgtaaaagtctgcaagtggatattcagacctctttgaggccttcgttggaaacgggtttttttcatataaggctagacagaagaattctcagtaacttccttgtgttgtgtgtattcagctgacagagttgaactttcatttagagagagcagatttgaaacactgtttttgtggaatttgcaagtggagatttcaagcgctttggggccaaaggcagaaaaggaaatatcttcgtataaaaactagacagaatcattctcagaaactgctctgctgatgtgtgcgttcaactctcagagtttaacttttcttttcattcagcagtttggaaacactctgtttgtaaagtctgcacgtggatattttgaccatttagaggctttcgttggaaacgggtttttttcttgtaaggctagacagaagaattcccagtaacttccttgtgttgtgtgcaatcaaatcacagagttgaacgttcccttagacagagtagatttgaaacactctatttgtgcaatttgcaagtgtagatttcaagcgctttaaggtcaaaggcagaaaaggaaatatcttcgtttcaaaactagacagaatgattctcagaaacttctttgtgatgtgtgcgttcaactcagagagtttaacatttcttttcatagagcagttaggaaacactctgtttgtaaactctgcaagtggatattcagacctcttcgaggtcttcgttggaaacgggatttcttcatactgtgctagacagaagaattctcagtaacttccttgtgttgtgtgtattcaactcacagagttgaacgatcctttacacagagcagacttggaacactctttttgtggaatttgcaagtggagatttcagccgcgttgaggtcaatggtagaaaaggaaatatcttcgtataaaaactagacagaatgattctcagaaactcctttgtgatgtgtgcgttcaactcacagagtttaacctttctgttcatagagcagttaggaaacactctgtttgtaaagtctgcaagtggatattcagatcctccttgaggccttcgttggaaacgggatttcttcatattctgctagacagaagaattctcagtaacttccttgtgttgtgtgtattcaactgacagagttgaactttcatttagagagagcagatttgaaacactgtttttgtggaatttgcaagtggagatttcaagcgctttgggcccaaaggcagaaaaggaaatatcttcgtataaaaactagacagaatcattctcagaaactgctctgcgatgtgtgcgttcaactctcagagtttaacttttcttttcattcagcagtttggaaacactctgtttgtaaagtctgcacgtggatattttgaccacttagaggccttcgttggaaacgggtttttttcctgtaaggctagacagaagaattcccagtaacttccttgtgttgtgtacattcaactcacagagttgaaccgttcccttagacagagcagatttgaaacactctttttgtgcaattggcaagtggagatttcaagcgctttgaggtcaatggcagaaaaggaaatatcttcgtttcaaaactagacagaatgattctcagaaactcctttgtgatgtgtgcgttcaactcacagagtttaacctttcttttcatagagcagttaggaaacactctgtttgtaaagtctgcaagtggatattcagacatctttgaggctttcgttggaaacgggatttcttcatattctgttagacagaagaattctcagaaacttcgttgtgttgtgtgttttcaactcacagagttcaacgatcctttacacagagtagatttgaaacactctttttgtggaattggcagggtggagatttcagccgctttgaggtcaatggtagaaaaggaaatatcttcgtataaaaactagacagagtgattctcagaaactcctttgtgatgtctgcgtttaactcacagagtttaacctttcttttcatagagcagttaggaaacactctgtttgtaaagtgtgcaagtggatattcagacctccttgaggccttcgttggaaacgggatttcttcatattctgctatacagaagaattcccagtaacttccttgtgttgtgtgtgttcaactcacagagttgaactttcatttacacagagcagatttgaaacactctttttgtggaatttgcaaatggagatttcaagcgctttgaggccaaaggcagaaaaggaaatatcttcgtataaaaactagacagaatcattctcagaaactgctctgcgatgtgtgcgttcaactctcagagtttaacttttcttttcatttagcagtttggaaacactctgtttgtaaagtctgcacgtggatattttgaccacttagaggcctacgttggaaacgggtttttttcctgtaaggctagacagaagaattcccagtaacttccttgtgttgtgtacattcaactcacagagttgaacgttcccttagacagagcagatttgaaacactctttttgtgcaattggcaaatggagatttcaagcgctttaaggtcaatggcagaaaaggaaatatcttcgtttcaaaactagacagaatcattcccacaaactgcgttgtgatgtgttcgttcaactcacagcagtttaacctttctgttcatagagcagttaggaaacactctgtttgtaaagtctgtaagtgcatattctgacatcttgtggccttcgttggaaacgggatttcttcatattctgctagacagaagaattctcagtaacttccttgtgttgtgtgtattcaactcacagagttgaacgatcctttacacagagcagacttgaaacactctttttgtggaatttgcaagtggagatttcagccgctttgatgtcaatggtagaaaaggaaatatcttcgtataaagactagacagaatgattctcagaaactcttttgtgatgtgtgcgttcaactcacagagtttaacctttcttttcatagagcagttaggaaacactctgtttgtaaagtctgcaagtggatattcagacctctttgaggccttcgttggaaacgggatttcttcatattctgctagacagaagaattctcagtaactaccttgtgttgtgtgtattcacctgacagagttgaacattcatttagagagagcagatttgaaacactgtttttgtggaatttgcaagtggagatttcaagaggtttggggccaaaggcagaaaaggaaatatcttcgtataaaaactagacagaatcattctcagaaactgctctgcgatgtgtgcgttcaactctcagagtttaacttttcttttcattcagcagtttggaaacactctgtttgtaaagtctgcacgtggatattttgaccacttagaggccttcgttggaaacgggctttttcctgtaaggctagacagaagaattcccagtaacttccttgtgttgtgtacattcaactcacagagttgaacgttcccttagacagagcagatttgaaacactctttttgtgcaattggcaaatggagatttcaagcgctttaaggtcaatggcagaaaaggaaatatcatcgtttcaaaactagacagaatgattctcagaaactcctttgggatgtgcgcgttcaactcacagagtttaacctttcttttcatagagcagttaggaaacactctgtttgtaaagtctgcaagtggatattcagacatccttgaggctttcgttggaaacgggatttcttcatattctgctagaaagaagaattctcagtaacttccttgtgttgtgtgtattcaactcacagagttgaacgatcctttacacagagcagacttgaaacactctttttgtgtaatttgcaagtggagatttcagccgctttgagttcaatggtagaataggaaatatcttcctatagaaactagacagaatgattctcagaaactcctttgtgatgtgtgcgttcaactcacagagttcaacctttcttttcatagagcagttgggaaacactctgtttgtaaagtctgcaagtggatattcagacttctttgaggccttcgttggaagcgggatttcttcatgttctgctagagagaagaattctcagaaacttccttgtgttgtgtgttttcaactcacagagttgaacgatcctttacacagagcagacttgaaacactctttttgtggaatttgcaagtggagatttcagcctctttgaggtcaatggtagaataggaaatatcttcctatagaaactagacagaatcattctcagaaactgctctgcgatgtgtgcgttcaactctcagagtttaacttttcttttcattcagcagtttggaaacactctgtttgtaaagtctgcacgtggatattttgaccatttagaggccttcgttggaaacgggtttttttcttgtaaggctagacagaagaattcccagtaacttccttgtgttgtgtgcattcaactcacagagttgaacgttcccttagacagagcagatttgaaacactctatttgtgcaatttgcaagtgtagatttcaagcgctttaaggtcaacggcagaaaaggaaatatcttcgtttcaaaactagacagaatcattcccacaaactgcgttgtgatgtgttcgttcaactcacagagtttaacctttctgttcatagagcagttaggaaacactctgtttgtaaagtctgcaagtggatattcagacctccttgaggccttcgttggaaacgggatttcctcatattctgctagacagaataattgtcagtaacttccttgtgttgtgtgtattcaactcacagagttgaacgatcctttacagagagcacacttgaaacactctttttgtggaatttgcaagtggagatttcagccgctttgaggtcaatggtagaataggaaatatcttcctatagaaactagacagaatgattctcagaaagtcctttgtgatgtgtgtgttcaaatcacagagtttaacctttcttttcatagagcagttagtaaacactctgtttataaagtctgcaagtggataatcagacccctttgaggccttcgttggaaacgggatttcctcatattatgctagacagaagaattcccagtaacttccttgtgttgtgtgtgttcaactcacagagttgaactttcatttacacagagcagatttgaaacactctttttgtggaatttgcaagtggagatgtcaagcgctttgaggccaaaggcagaaaaggaaatatcttcgtaaaaaaactagacagaatcattctcagaaactgctctgcgatgtgtgcgttcaactctcagactttaacttttcttttcattcagcagtttggaaacactctgtttgtaaagtctgcacgtggataatttgacaacttagaggccttcgttggaaacgggttttttcatgtaaggctagacagaagaattcccagtaacttccttgtgttgtgtacattcaactcacagagttgaacgttccgttagacagagcagatttgaaacactctttttgtgcaattggcaaatggagatttcaagcgctttaagttcaatggcagaaaaggaaatatcttcgtttcaaaactagacagaatcattgccacaaactgcgttgtgatgtgttcgttcaactcacagagtttaacctttcttttcatagagcagttaggaaacagtctgtttgtaaattctgtaagtggatattctgacatcttgtgaccttcgttggaaacgggatttcttcatattctgctagacagaagatttctcagaaatttccttgtgttgtgtgtattcaactcacagagttgaacgatcctttactcagagaagacttgaaacactccttctgtggaatttgcaagttgagatttcagccgctttgaggtcaatggtagaataggaaatatcttcctatagaaactagacagaatgattctcagaaactcctttgtgatgtgtgcgttcaactcacagagtttaacctttcttttcatagagcagttaggaaacactctgtttgtaaagtctgcaattggatattcagacctctttgaggccttcgttggaaacgggatttcttcatattatgctagacagaagaattctcagtaacttccttgtgttgtgtgtattcaactcacagagttggactatcctttacacagagcagacttgaaacactctttttgtggaatttgcaagtggagatttctgccgctttgaggtcaatggtagaaaaggaaatatcttcgtataaaaactagagagaatcattctcagaaactgctctgtgatgtgtgcgttcaactctcagagtttaacttttcttttcattcagcagtttggaaacactctgtttgtaaagtctgcacgtggatattttgaccatttagaggccttcgttggaaacgggtttttttcttgtaaggctagacagaagaattcccagtaacttccttgtgttgtgtacattcaactcacagagttgaacgttcccttagacagagcagatttgaaacactctttttgtgcaattggcaagtggtgatttcagctgctttgaggtcaatggtagaaaagggaatatcttcgtataaaaactagacagaatcattcccacaaactgcgttgtgatgtgttcgttcaactcacagagttttacctttctgttcatagagcagttaggaaacactctgtaaagtctgtaagtggatattctgacatcttgtggccttcgctggaaacgggatttcttcatattctgctagacagaagaattctcagtaacttccttgttgttgtgtgtattcaactcacagagttgaacgatcctttacacagagcagacttgtaacactctttttgtggaatttgcaagtggagatttcagccgctttgacgtcaaaggtagaaaaggaaatatcttcctataaaaactagacagaatgattctcagaaacttccttgtgatgtgtgcgttcacctcacagagtttaacctttcttttcatagagcagttaggaaacactctgtaaagtctgcaagtggatattcagacctctttgaggccttcgttggaaacgggtttttttcatataaggctagacagaagaattctcagtaacttccttgtgttgtgtgtattcaactcacagagttgaacgatcctttacacagagcagacttgaaacactctttttgtggagtttgcaagtggagatttcagccgctttgaggtcaatggtagaaaaggaaatatcttcgtataaaaactagacagaatcattctcagaaaatgctctgtgatgtgtgcgttcaactctcagagtttaacttttcttttcattcagcagtttggaaacactctgtttgtaaagtctgcacgtggatattttgaccacttagaggccttcgttggaaacgggtttttttcatgtaagggtagacagaagaattcccagtaacttccttgtgttgtgtgcattcaactcacagagttgaacgttcccttagacagagcagatttgaaacactctatttgtgcaatttgcaagtgtagatttcaagcgctttaaggtcaacggcagaaaaggaaatatcttcgtttcaaaactagacagaatcattcccacaaactgcgttgtgatgtgttcgttcaactcacagagtttaacctttctgttcatagagcagttaggaaacactctgtttgtaaagtctgcaagtagatattgagacctcctagaggccttcgttggaaacgggatttcttcatattctgctagacagaagaattctcagtaccttccttgtgttgtgtgtattcaactcacagagttgaacgatcctttacacacagcagacttgtaacactctttttgtggaatttgcaagtggagatttcagccgctttgaagtcaaaggtagaaaaggaaatatcttcctataaaaactagacagagtgattctcagaaactcctttgtgatgtgtgcgtttaactcacagagtttaacctttcttttcatagagcagataggaaacactctgtttgtaaagtctgcaagtggatattcagacctccttgaggccttcgttggaaacgggatttcttcatattatgctagacagaagaattcccagtaacttccttgtgttgtgtgtgttcaactcacagagttgaactttcatttacacagagcagatttgaaacactctttttgtggaatttgcaggtggagatttcaagcgctttgagaccaaaggcagaaaaggaaatatcttcgtataaaaactagacagaatcattctcagaaactgctctgcgatgtgtgcgttcaactctcagagtttaacttttcttttcattcagcagtttggaaacactcagtttgtaaactctgcaagtggatattcagacctctttgaggccttcgttggaaacgggatttcttcatactatgctagacagaagaattcccagtaacttccttgcgttgtgtacattcaactcacagagttgaacgttcccttagacagagcagatttgaaacactctttttgtgcaattggcaagtggagatttgaagcgctttgaggtcaatggcagaaaaggaattatcttcgtttcaaaactagacagaatgattctcagaaaatcttttgtgatgtgtgcgttcaactcacagagtttaacttttcttctcatagagcagttaggaaacactctgtttgtaaagtctgcaagtggatattcagacctgtttgaggccttcgttggatacgggatttcttcatattatgctagacagaataattctcagtaacttccttgtgttgtgtgtattcaactcacagagttgaaggatcctttacagagagcaggcttgaaacactctttttgtcgaatttgcaagtggagatttcagccgctttgaggtcaatggtagaataggaaatatcttcttatagaaactagacaaaatgattctcagaaacttcattgtgatgtgtgcgttcaactcacagagtttaacctttcttttcatagagcagttaggaaacactctgtttgtaaagtctgcaagtggatattcagacctctttgaggccttcgttggaaacgggtttttttcatgtaaggctagacagaagaattctcagtaacttccttgtgttgtgtgtattcacactgacagagttgaactttcatttagagagagcagttttgaaacactgtttttgtggaatttgcaagtggagatttcaagcgctttggggccaaaggcagaaaaggaaacatcttcgtatgaaaactagacagaaatcattctcagaaaactgctgcgtgatgtgtgcgttcaactctcagagtttaacttttcttttcattcagcggtttggaaacactctgtttgtaaagactgcacgtggatattttgaccacttagaggccttcgttggaaacgggtttttttcatgtaaggctagacagaagaattcccagtaacttccttgtgttgtgtgcattcaactcacagagttgaacgttcccttagacagagcagatttgaaacactctatttgtgcaatttgcaagtgtagatttcaagcgctttaaggtcaatggcagaaaaggaaatatcttcgtttcaaaactagacagaatgattctcagaaactcctttgtgatgtgtgccttcaactcacagagtttaacctttctgttcatagagcagttaggaaacactctgtttgtaaagtctgcaagtggatatccgacctccttgaggccttcgttggaaacgggatttcttcatattctgctagacagaataattctcagtaacttccttgtgttgtgtgtattcaactcacagagttcaacgatcctttacacagagcagacttgaaacactgtttttgtggaatttgcaagtggagatttcagccgctttgaggtcaatggtagaaaaggaaatatcttcctataaaaactagacagaatgattctcagaaactcctttctgatgtgtgcgttcaactcacagagtttaacttttcttttcatagagcagttaggaaacactctgtttgtaaagtctgcaagtggatattcagacctctttgaggccttcgttggaaacgggatttcttcatattatgctagacagaagaattctcagtaacttccttgtgttgtgtgtattcaactcacagagttgaactttcatttacacagagcagatttgaaacactctttttgtggaatttgcaagtggagatttcaagcgctttgaggccaaaggcagaaaaggaaatgtcttcgtttcaaaactagacagaatcattctcagaaactgctctgcgatgtgtgcgttcaactctcagagtttaacttttcttttcattcagcagtttggaaacactctggttgtaaagtctgcacgtggatattttgaccacttagaggccttcgttggaaacgggtttttttcctgtaaggctagacagaagaattcccagtaacttccttgtgttgtgtacattcaactcacagagttgaacgttcccttagacagagcagatttgaaacactctttttgtgcaattggcaaatggagatttcaagcgctttaaggtcaatggcagaaaaggaaatatcttcgtttcaaaactagacagaatgattctcagaaactcctttgtgatgtgtgcgttcaactcacagagtttaacttttcttttcatagagcagttaggaaacactcggtttgtaaagtctgcaagtggatattcagacctctttgaggccttcgttggaaacgggatttcttcatattatgctagacagaagaattctcagtaacttccttgtgttgtgtgtattcaactcacagagttgaacgatgctttacacagagcagacttgaaacattctttttgtggaatttgcaagtggagatttcagccgctttgaggtcaatggtagaataggaaatatcttcctatagaaactagacagaatgattctcataaactcctttgtgatgtgtgcgttgaactcacagagtttaacctttcttttcatggagcagttaggaaacactctgtttataaagtctgcaagtggatattcagacccctttgaggccttcgttggaaacgggatttcttcatattatgctagacagaagaattctcagtaacttccttgtgttgtgtgtattcaactgacagagttgaactttcatttagagagagcagatttgaaacactgtttttgtggaatttgcaaatggagatttcaagcgctttggggccaaaggcagaaaaggaaatgtcttcgtataaaaactagacagaatcattctcagaaactgctgcgtgatgtgtgcgttcaactctcagagtttaacttttcttttcattcagcggtttggaaacactctgtttgtaaagtctgcacgtggatattttgaccacttagaggccttcgttggaaactggttttttgcatgtaaggctagacagaagaattcccagtaacttccttgtgttgtgtgcattcaactcacagagttgaacgttcccttagacagagcagatttgaaacagcctatttgtgcaatttgcaagtgtagatttcaagcgctttaaggtcaacggcagaaaaggaaatatcttcctttcaaaacaagacagaatcattcccacaaactgcgttgtgatgtgttcgttcaactcacagagtttaacctttctgttcatagagcagttaggaaacactctgtttgtaaagtctgtaagtggatattctgacatcttgtggccttcgttggaaacgggatttcttcatattctgctagacagaagaattctcagtaacttccttgtgttgtgtgtattcaactcacagagttgaacgatcctttacacagagcagacttgaaacactcttttcgtggaatttgcaagtggagatttcagccgttttgaggtcaatggtagaaaaggaaatatcttcgtataaagactagacagaatgattctcagaaactcctttgtgatgcgtgcgttcaactcacagagtttaacctttcttttcatagagcagttaggaaacactctgtttgtaaagtctgcaagtggatattcagacctccttgaggccttcgttggaaacgggatttcttcatattatgctagacagaagaattctcagtaacttccttctgttgtgtttattcaactcacagagttgaatgatcctttacacagagcagacttgaaacactctttttgtggaaattgcaagtggagatttcagccgctttgaggtcaatggtagaaaagtaaatatcttcgtataaagactagacataatcattctcagaaactgctgtgtgatgtgtgcgttcaactctcagagtttaacttttcttttcattcagcggtttggaaacactctgtttgtaaagtctgcacgtggaaattttgaccacttagaggccttcgttggaaacgggtttttttcatgtaaggctagacagaagaattcccagtaacttccttgtgttgtgtacattcaactcacagagttgaacgttcccttagacagagcagatttgaaacactctttttgtgcaattggcaagtggagatttcaagcgctttaaggtcaatggcagaaaaggaaatatcttcgtttcaaaactagacagaatcattcccacaaactgcgttgtgatgtgttcgttcaactcacagagtttaacttttcttctcattcagcagtttggaaacactctgtttgtaaagtctgcacgtggataatttgaccacttagaggccttcgttggaaacgggtttttttcatgtaaggctagacagaagaattctcagtaacttcccttgtgttgtgtgtattcaactcacagagttgaacgatcctttacacagagcagacttgaaacactctttttgtggaatttgcaagtggagatttcagccgctttgaggtcaatagtcgaaaaggaaatatcttcgtagaaaaactagacaaaatgattctcagaaactcctttgtgatgtgtgcgttcaactcacagagtttaacctttcttttcatagagcagttaggaaacactctgtttgtaaagtctgcaagtggatattcagacctccttgaggccttcgttggaaacgggatttcttcatgttctgctatacagaagaattctcagtaacttcccttgtgttgtgtgtattcaactgacagagttgaactttcatttagagagagcagatttgaaacactgtttttgtggaatttgcaagtggagatttcaagcgctttgggaccaaaggcagaaaaggaaatatcttcgtataaaaactagacagaatcattctcagaaactgctctgcgatgtgtgcgttcaactctcagagtataacttttcttttcattcagcagtttggaaacactctgtttgtaaagtctgcacgtggataatttgaccacttagaggccttcgttggaaacgggtttttttcatgtaaggctagacagaagaattcccagtaacttccttgttgttgtgtgcattcaactcacagagttgaacgttcccttagacagagcagatttgaaacactctatttgtgcaatttgcaagtgtagatttcaagcgctttaaggtcaatggcagaaaaggaaatttcttcgttttaaaactagacagaattattctcagaaactcctttgtgatgtgtgcgttcaactcacagagttcaacctttcttttcatagagcagttgggaaacactctgtttgaaaagtctgcaagtggatattcagacttctttgaggccttcgttggaagcgggatttcttcatgttctgctagagagaagaattctcagaaacttccttgtgttgtgtgttttcaactcacagagttgaacgatgctttacacagagtagacttgaaacaatctttttgtgtaatttgcaagaggagatttcagccgctttgaggtcaatggtagaaaaggaaatatcttcgtataaaaactagacagaatgattctcagaaactcctttgtgatgtgtgcgttcaactcacagagtttaacctttcttttcatagagcagttaggaaacactctgtttgtaaagtctgcaagtggatattcagacctccttgaggccttcgttggaaacgggatttcttcatattatgctagacagaagaattctcagaaacttccttgtgttgtgtgtattgaactcacagagttgaatgatcctttactcagagcagacttgaaacactccttttgtggaatttgcaagtggagatttcagccgctttgaggtcaatggtagaataggaattatcttcctatagaaactagacagaatcattctcagaaactgctgcgtgatgtgtgcgttcaactctcagagtttaacttttcttttcattcagcggtttggaaacactctgtttgtaaagtctgcacgtggaaattttgaccacttagaggccttcgttggaaacggttttttttcatgtaaggctagacagaagaattcccagtaacttccttgtgttgtgtacattcaactcacagagttgaacgttcccttagacagagcagatttgaaacactctttttgtgcaattggcaaatggagatttcaagcgctttaagttcaatggcagaaaaggaaatatcttcgtttcaaaactagacagaatgattctcagaaactcctttgtgatgtgtgcgttcaactcacagagtttaacctttcttttcgtagagcagttaggaaacactctgtttgtaaagtctgcaagtggatattcagacctctttgaggccttcgttggaaacgggatttcttcatattctgctagacagaagaattctcagaaacttccttgtgttgtgtgcattcaactcacagagttgaacgatccgttacacagtgcagacttgaaacactctttttgtggaatttgcaaggggagatttcagccgctttgaggtcaatggtagtaaaggaaatatcttcgtataaaaactagacagaatgattctcagaatctcctttgtgatgtgtgcgttcaactcacagagtttaacctttcttttcatagagcagttaggaaacactctgtttgtaaagtctgcaagtggatattcagacctctttgaggccttcgttggaaacgggttttttacatataaggctaaacagaagaattcccagtaacttccttgtgttgtgtgtgttcaactcacagagttgaactttgatttacacagagcagatttgaaacactctttttgtggaatttgcaagtggagatttcaagcgctttgaggccaaaggcagaaaaggaaatatcttcgtataaaaacttgtcagaatcattctcagaaactgctctgcaatgtgcgcgttcaactctcagagtttaacttttcttttcattcagcagtttggaaacactctgtttgtaaagtctgcacgtggatattttgaccacttagaggccttcgttggaaacgggtttttttcctgtaaggctagacagaagaattcccagtaacttccttgtgttgtgtacattcaactcacagagttgaacgttcccttacacagagcagatttgaaacactctttttgtgcacttggcaagtggagatttcaagcgctttaaggtcaatggcagaaaaggaaatatcttcgtttcaaaactagacagaatcattctcagaaactgctctgcgatgtgtgcgttcaactctcagagtttaacttttcttttcattcagcagtttggaaacaatctgtttgtaaagtctgcacgtggataatttgaccacttagagaccttcgttggaaacgggtttttttcatgtaaggctagacagaagaattctcagaatcttccttgtgttgtgtgtattcaactcacagagttgaacgatcctttacacagagcagacttgaaacactctttttgtggaatttgcaagtggagatttcagccgctttgaggtccgtgttagaaaaggaaatatcttcgtacaaaaactagacagaatgattctcagaaactcctttgtgatgtgtgcgttcaactcacagagtttaaactttctttacatacagcagttaggaaacactctgtttgtaaagtctgcaagtggatattcagacctctttgaggccttcgttggaaacgggtttttttcatataaggctagacagaagaattcccagtaacttccttgtgttgtgtgtgttcaactcacagagttgaactttcatttacacagagcagatttgaaacactctttttgtggaatttgcaagtggagatttcaagcgctttcaggccaaaggcagaaaaggaaatatcttcgtataaaaactagacagaatcattctcagaaactgctctgcgatgtgtgcgttcaactctcagagtttaacttttcttttcattcagcagtttggaaacactctgtttgtaaagtctgcacgtggataatttgaccacttagagtccttcgttggaaacgggtttttttcatgtaaggctagacagaagaattctcagtaacttccttgtgttgtgtgtattcaactcacagagttgaacgatcctttacacagagcagacttgtaacactctttttgtggaatttgcaagtggagatttcagccgctttgaagtcaaaggtagaaaaggaaatatattcctataaaaactagacagaatgattctcagaaacttcttggtgatgtgtgcgttcaactcacagagtttaacctttcttttcatagagcagttaggaaacagtctgtttgtaaactctgcaagtggatattcagacctctttgaggccttcgttggaaacgggatttcttcatactgtgctacacagaagaattctcagtaacttccttgtgttgtgtgtattcaactcacagagttgaacgatcctttacacagagcagacttgaaacactctttttgtggaatttgcaagtggagatttcagccgcgttgaggtcaatggtagaaaaggaaatatcttcgtataaaaactagacagaatcattctcagaaactcctttgtgatgtgtgtgttcaactcacagagtttaacctttcttttcatagagcagttagtaaacactctgtttataaagtctgcaagtggatattcagacccctttgaggccttcgttggaaacgggatttcttcatattatgctagacagaagaattcccagtaacttccttgtgttgtgtgtgttcaactcacagagttgaactttcatttacacagagcagatttgaaacactctttttgtggaatttgcaagtggagatttcaagccctttgaggccaaaggcagaaaaggaaatatcttcgtataaaaactagacagcatcattctcagaaactgctctgcgatgtgtgcgttcaactctcagagtttaacttttcttttcattcagcagtttggaaacactctgtttgtaaagtctgcacgtggataacttgaccacttagaggccttcgttggaaacgggtttttttcatgtaaggctagacagaagaattcccagtaacttccttgtgttgtgtacattcaactcacagagttgaacgttcccttagacagagcagatttgaaacactctttttgtgcaattggcaaatggagatttcaagcgctttaaggtcaatggcagaaaaggaaatatcttcgtttcaaaactagacagaatcattcccacaaactgcgttgtgatgtgttcgttcaactcacagagtttaacctttcttttcatagaggagttaggaaacagtctgtttgtcaattctgtaagtggatattctgacatcttgtggccttcgttggaaacgggatttcttcatattctgctagacagaagaattcccagtaacttccttgtgttgtgtgtgttcaactcacagagttgaactttcatttacacacagcagatttgaaacactctttttgtggaatttgcaagtggagatttcagccgcgttgaggtcaatggtagaaaaggaaatatcttcgtataaaaactagacagaatgattctgagaaactcctttgtgatgtgagcgttcaactcacacagtttaacctttcttttcatagagcagttaggaaacactctgtttgtaaagtctgcaagtggatattcagacctccttgaggccttcgttggaaacgggatttcttcatattatgctagacagaagaattctcagtaacttccttgtgttgtgtgtattcaactcacagagttgaacgatcctttacacagagcagacttgaaacactccttttgtggaatttgcaattggagatttcagccgctttgaggtcaatggtagaataggaaatatcttcctatagaaactagacagaatgattctcataaactcctttctaatgtgtgcgttcaactcacaaagtttaacttttcttttcatagagcagttaggaaacactctgtttgtaaagtctgcaagtggatattcagacctctttgaggccttcgtaggaaacgggatttcttcatattatgctagacagaagaattcccagtaacttccttgtgttttgtgcattcaactcacagagttgaacgttcccttagacagagcagatttgaaacactctatttgtgcaatttgcaagtgtagatttcaagcgctttaaggtcaatggcagaaaaggaaatatcttcgtttcaaaactagacagaatcattcccacaaactgcgttgtgatgtgttcgttcaactcacagaatttaacctttctgttcatagagcagttaggaaacactctgtttgtaaagtctgtaagtggatattctgacatcttgtggccttcgttggaaacgggatttcttcatattctgctagacagaataattctcagtaacttccttgtgttgtgtgtattcaactcacagagttgaacgatcctttacacagagcagacttgaaacactctttttgtggaatttgcaagtggagatttcagccgctttgaggtcaatggtagaataggaaatatcttcctatagaaactagacagaatgattctcagaaacttctttgtgatgtgtgtgttcaactcacagagtttaacctttcttttcatagagtagttaggaaacactgtgttttcaaactctgcaagtggatattcagacctctttgaggccttcgttggaaacgggtttcttcatactgtgctagacagaagaattcccagtaacttccttgtgttgtgtgtgttcaactcacagagttgaactttcatttacccagagcagatttgaaacactctttttgtggaatttgcaagtggagatttcaagcgctttgaggccaaaggcagaaaaggaaatatcttcgtttcaaaactagacagaatcattctcagaaactgctctgcgatgtgtgcgttcaactctcagagtttaacttttcttttcattcaacagtttggaaacactctgtttgtaaagtctgcacgtggatattttgaccacttagaggccttcgttggaaacgggattttttcctgtaaggctagacagaagaattcccagtaacttccttgtgttgtgtacattcaactcacagagttgaacgttcccttagacagagcagatttgaaacactctttttgtgcaattggcaaatggagatttcaagcgctttaaggtcaatggcagaaaaggaaatatcttcgtttcaaaactagacagaatcattcccacaaactgcgttgtgatgtgttcgttcaactcacagagtttaacctttcttttcatagagcagttaggaaacagtctgtttgtaaattctgtaagtggatattctgacatcttgtggccttcgttggaaacgggatttcttcatattctgctagacagaaaaaattctcagtaacttccttgtgttgtgtgtattcaactcacagagttgatcgatcctttacacagagcatacttgaaacactcttcttgtggaatctgcaagtggagatttcagccgctttgaggtcaatggtagaataggaaatatcttcctatagaaactagacagaatgattctcataaactcctttgtgatgtgtacgttcaactcacagagtttaacatttcttttcatagagcagttaggaaacactctgtttgtaaagtctgcaagtggatattcagtcctccttgaggccttcgttggaaacgggatttcttcatattctgctagacagaagaattctcagtaacttccttgtgttgtgtgtattcaactgacagagttgaactttcatttggagagagcagatttgaaacactgtttttgtggaatttgcaagtggagatttcaagcgctttggggccaaaggcagaaaaggaaatatcttcgtataaaaacgagacagaatcattctcagaaactgctgtgtgatgtgtgcgttcaactctcagagtttaacttttcttttcattcagcggtttggaaacactctgtttgtaaagtctgcacgtggatattttgaccacttagaggccttcgttggaaacgggtttttttcatgtaaggctagacagaagaattcccagtaacttccttgtgttgtgtgcattcaactcacagagttgaacgttcccttagacagagcagatttgaaacactctatttgtgcaatttgcaagtgtagatttcaagcgctttaaggtcaacggcagaaaaggaaatatcttcgtttcaaaactagacagaattattcccacaaactgcgttgtgatgtgttcgttcaactcacagagtttaacctttctgttcatagagcagttaggaaacactctgtttgtaaagtctgtaagtggatattctgacatcttgtggccttcgttggaaacgggatttcttcatattctgctagacagaagaattctcagaatcttccttgtgttgtgtgtattcaactcacagagttgaacgatcctttacacagagcagacttgaaacactctttttgtggaatttgctagtggagatttcagccgctttgaggtccatggtagaaaaggaaatatcttcgtataaaaactagacagaatgattctcagaaactcctttgtgatgtgtgcgttcaactcacagagttcaacctttcttttcatagagcagttgggaaacactctgtttgtaaagtctgcaagtggatattcagacttctttgaggccttcgttggaagcgggatttcttcatgttctgctagacagaagaattctcagaaacttccttgtgttgtgtgttttcaactcacagagttgaacgatcctttacacagagcagacttgaaacactacttttgtggaatttgcaagtggagatttcagccgctttgaggtcaatggtagaataggaaatatcttcctatagaaactagacagaatcattctcagaaaccgctctgtgatgtgtgcgttcaactctcagagtttaacttttcttttcattcagcagtttggaaacactctgtttgtaaagtctgcacgtggatattttgaccacttagaggccttcgttggaaacgggtttttttcatgtaaggctagacagaagaattcccagtaacttccttgtgttgtgtgcattcacctcacagagctgaacgttcccttagacagagcagatttgaaacactctatttgtgcaatttgcaagtgtagatttcaagcgctttaaggtcaatggcagaaaaggaaatatcttcgtttcaaaactagacagaatgattctcataaactcctttgtgatgtgtgcgttcaactcacagagtttaacttttcttttcatagagcagttaggaaacactctgtttgtaaagtctgcaagtggatattcagacctctttgaggccttccttggaaacgggatttcttcatattctgctagacagaagaattctcagtaacttccttgtgttgtgtgtattcaactcacagagttgaacgatcctttacacagagcagacttgaaacattctttttgtggaatttgcaagtggagatttcagccgctttgaggtcaatggtagaataggaaatatcttcctatagaaactagacagaatgattctcagaaactcctttgtgatgtgtgcattcaactcacagagtttaacctttcttttcatagagcagttaggaaacactctgtttgtaaagtctgcaagtggatattcagacatccttgaggctttcgttggaaacgggatttcttcatattctgctagaaagaagaattctcagtaacttcccttgtgttgtgtgtattcaactcacagagttgaacaatcctttacacagagcagacttgaaacactctttttgtggaatttgcaagtggagatttcagccactttgaggtcaatggtagaataggaaatatcttcctatagaaactagacagaatcattctcagaaactgctgcttgatgtgtgcgttcaactctcagaatttaacttttcttttcattcagcggtttggaaacactctgtttgtaaagtctgcacgtggaaattttgaccacttagaggccttcgttggaaacgggtttttttcatgtaaggctagacagaagaattcccagtaacttccttgtgttgtgtgcattcaactcacagagttgaacgttcccttagacagagcagatttgaaacactctatttgtgtaatttacaagtgtagatttcaagcgcattaaggtcaatgacaaaaaggaaatatcttcgtttcaaaactagacagaatcattcccacaaactgcgttgtgatgtgttcgttcaactcacagagtttaacctttctgttcatagagcagttaggaaacactctggttgtaaagtttgccagtggatattcagacctctttgaggtcttcgttggaaacgggatttcttcatattctgctagacagaataattctcagtaacttccttgtgttgtgtgtattcaactcacagagttgaacgatcctttacacagagcagacttgaaacactctttttgtggaatttgtaagtggagatttcagccgctttgaggtcaatggtagaataggaaatatcttcctatagaaactagacagaatgattctcagaaactcctttgtgatgtgtgcgttcaactcacagagtttaacctttcttttcatagagcagttaggaaacactctgtttgtaaagtctgcaagtggatattcagacatccttgaggccttcgctggaaaagggatttcttcatattatgctagacagaagaattcctagtaacttccttgtgttgtgtgtgttcaactcacagagttgaactttcatttacacagagcagatttgaaacactctttttgtggaatttgcaagtggagatttcaagcgctttgagaccaaaggcagaaaaggatatatcttcgtataaaaactagacagaatcattctcagaaaatgctctgcgatgtgtgcgttcaactctcagagtttaacttttcttttcattcagcagtttggaaacaatctgtttgtaaagtctgcacgtggataatttgaccacttagaggccttcgttggaaacgggtttttttcatgtaaggctagacacaagaattctcagtaacttccttgtgttgtgtgtattcaactcacagagttgaacgatcctttacacagagcagacttgaaacactctttttgtggaatttgcaagtggagatttcagccgctttgaggtcaatgctagaataggaaatatcttcctatagaaactagacagaatgattctcagaaagtcctttgtgatgtgtgcgttcaactcacagagtttaacctttcttttcatagagcagttaggaaacactctgtgtgtaaagtctgcaagtggatattcagacctctttgaggccttcgttggaaacgggatttcttcatattatgctagacagaataattctcagtaacttccttgtgttgtgtgtattcaactcacagagttgaacgatcctttacagagagcagacttgaaacactctttttgtggaatttgcaagtggagatttcagccgctttgaggtcaatggtacaataggaaatatcttcctatagaaaatagacagaatgattctcagaaactcctttgtgatgtgtgtgttcaacccacagagtttaacctttcttttcatagagcagttagtaaacactctgtttataaagtctgcaagtggatattcagacccctttgaggccttcgttggaaacgggatttcttcatattatgctagacagaagaattcccagtaacttccttgtgttgtgtgtgttcaactcacagagttgaactttcatttacacagagcagttttgagacactctttttgtggaatttgctaatggagatttcaagcgctttgaggccaaaggcagaaaaggaaatatcttcgtataaaaactagacagaatcattctcagaaactgctctgcgatgtgtgcgttcaactctcagagtttaacttttcttttcattcagcagtttggaaacactctgtttgtaaagtctgcacgtggataatttgaccacttagaggccttcgttggaaacgggtttttttcatgtaaggctagacagaagaattctcagtaacttccttgtgttgtgtgtattcaactgacagagttgaactttcatttagagagagcagatttgaaacactgtttttgtggaatttgcaagtggagatttcaagcgctttaaggtcaacggcagaaaaggaaatatcttcgtttcaaaactagacagaatgattctcagaaactcctttgtgatgtgtgcgttcaagtcacagagttcaacctttcttttcatagagcagttgggaaacactctgtttgtaaagtctgcaagtggatattcagacttctttgaggccttcgttggaagcgggatttcttcatattctgctagacagaagaattctcagtaactgccttgtgttgtgtgtattcaactcacagagttgaacgatgctttacacagagcagacttgaaacactctttttgtggaatttgcaagtggagatttcagccgctttgaggtcaatggtagaataggaaatatcttcctatagaaactagacagaaatgattctcagaaactcctttgtgatgtgtgcgttcaactcacagagtttaacctttcttttcatagagcagttaggaaacactctgtttgtaaagtctgcaagtggatattcagacatccttgaggctttcgttggaaacgggatttcttcatattctgctagaaagagaattcccagtaacttccttgtgttgtgtgtgttcaactcacagagttgaactttcatttacacagagcagatttcaaacactctttttgtggaatttgcaaatggagatttcaagcgctttgaggccaaaggcagaaaaggaaatatcttcgtttcaaaactagacagaatcattctcagaaactgctctgtgatgtgtgcgttcaactctcagagtttaacttttgttttcattcagcagtttggaaacaatctgtttgtaaagtctgcacgtggatattttgaccacttagaggccttcgttgaaaacgggtttctttcatgtaaggggagacagaagaattcccagtaacttccttgcgttgtgtacattcaactcacagagttgaacgttcccttagacagagcagatttgaaacactctttttgtgcaattggcaagtggagatttcaagcgctttaaggtcaatggcagaaaaggaaatatcttcgtttcaaaactagacagaatgattctcagaaacttctttgtgatgtgtgcgttcaactcacagagtttaacctttcttttcatagagcagttaggaaacactctgtttgtaaactctgcaagtggatattcagacctcttggaggccttcgttggaaacgggatttcttcatactatgctagacagaagaattctcagtaacttccttgtgttgtgtgtattcaactcacagagttgaacgatcctttacacagagcagacttgtaacactctttttgtggaatttgcaagtggagatttcagccgctttgaagtcaaaggtagaaaaggaaatatcttcctataaaaactagacagaatgattctcagaaactcctttgtgatgtgtgcgttcaactcacagagtttaacctttcttttcatagagcagttaggaaacactctggttgtaaagactacaagtggatattcagacctctttgaggccttcgttggaaacgggtttttttcctgtaagtctagacagaagaattcccagtaacttccttgtgttgtgtgtgttcaactcacagagttgaactttgatttacacagagcagatttgaaacactctttttgtggagtttgcaagtggagatttcaagcgctttgaggccaaaggcagaaaaggaaatatcttcgtataaaaactagacagaatcattcccacaaactgcgttgtgatgtgtgcgttcaactcacagagtttaacctttcttttcatagagccgtttgtaaacgctctgtttgccaagtctgcaagtggatattctgacatcttgtggacttcgttggaaacgggatttcttcatattctgctagacagaagaattctcagaaacttccttgtgttctgtgtattcaactcacagagttgaacgatcctttacacagagcagatttgacacactctttttgtggaatttgcaagtggagatttcagccgctttgaggtccatggtagaaaaggaaatatcttcgtataaaaactagacagaatgattctcagaaacttctttgtgatgtgtgcgttcaactcacagagtttaacctttcttttcatagagcagttaggaaacactctgtttgtaaatcagcaagtggatattcagacctctttgaggccttcgttggaaacggaatttcttcatattatgctagacagaggaattctcagtaacctccttgtgttgtgtgtactcaactcacagagttgaacgatcctttacacagagcagactagaatcactctttttgtggaatttgcaagtggagatttcagccgctttgaggtcaatggtagaaaaggaaatatcttcgtataaaaactagacagaatgattcccagaaactcctttgtgatgtgtacgttcaactcacagagtttaacctttcttttcatagagcagttaggaaacactctgtttgtaaactctgcaagcggatattcagaccgctttgaggccttcgttggaaacgggatttcttaatattatgctagacaaaagaattcccagtaacttccttgtgttgtgtgtgttcaactcacagagttgaactttcatttacacagagcagatttgaaacactctttttatggaatttgcaaatggaggtttcaagcgctttgaggccaaaggcagaaaaggaaatatcttcgtataaaaactagacagaatcattctcagaaactgctgcgtgatgtgtgcgttcaactcacagagtttaacttttcttttcattcagcggtttggaaacactctgtttgtaaagtctgcacgtggatattttgaccacttagaggccttcgttggaaacgagattttttcatgtaaggctagacagaagaattcccagtaacttccttgtgttgtgtgcattcaactcacagagttgaacgttcccttagacagagcagatttgaaacactctatttgtgcaacttgcaagtgtagatttcaagcgctttaacctcaatggcagaaaaggaaatatcttcgtttcaaaactagacagaatcattcccacaaactgctttgtgatgtgttcgttcaactcacagagtttaacctttcttttcatagagcagttaggaaacagtctgtttgtcaattctgtaagtggatattctgacatcttgtggccttcgttggaaacgggatttcttcatattctgctagacagaagaattcttagaaacttccttgtgttgtgtgttttcaactcacagagttgaacgatcctttacacagagcagacttgaaacactctttttgtggaatttgcaagtggagatttcagccgctttgaggtcaatggtagaataggaaatatcttcctatagaaagtagacagaatgattctcagaaactcctttgtgatgtgtgcgttcaactcacagagtttaacctttcttttcatagagcagttaggaaacactctgtttgtaaagtctgcaagtggatattcagacctccttgaggccttctttggaaacgggatttcttcctattatgctagacagaagaattctcagtaacttccttgtgttgtgtgtattcaactcacagagttgaacgatcctttacacagagcagacttgaaacactctttttgtggaatttgcaagtggagatttcagccgctttgaggtcaatggtagaataggaaatatcttcctgtagaaactagacagaatcattctcagaaactgctctgcgatgtgtgcgttcagctctcagagtttaacttttcttttcattcagcagtttggaaacactctgtttgtaaagtctgcacgtgcataatttgaccacttagaggccttcgttggaaacgggtttttttcatgtaaggctagacagaagaattcccagtaacttccttgtgttgtgtacattcaactcacagagttgaacgttcccttagacagagcagatttgaaatactctttttatgcaattggcaagtggagatttcaagcgctttaaggtcaatggcagaaaaggaaatatcttcgtttcaaaactagacagaatcattcccacaaactgcgttgtgaagtgctcgttcaactcatagagtttaacctttctgttcatagagcagttaggaaacactctgtttgaaaagtctgtaagtggatattctgacatcttgtggccttcgttggaaacgggatttcttcatattctgctagaaagaagaattctcagtaacttccttgtgttgtgtgtattcaactcacagagttgaacgatcctttacacagagcagacttgaaacactctttttgtggaatttgcaagtggagatttcagccgctttgaggtcaatggtagaataggaaatatcttcctatagaaactagacagaatgattctcagaaactcctttgtgatgtgtgcgttcaactcacagagtttaacctttcttttcatagagcagttaggaaacactctgtttgtacagtctgcaagtggatattcagacctccttgaggccttcgttggaaacgggtttttttcatataaggctagacagaagaattcccagtaacttccttgtgttgtgtgtgttcaactcacagagttgaactttcatttacacagagcagatttgaaacactctttttgtggaatttgcaagtggagatttcaagcgctttgaggccaaaggcagaaaaggaaatatcttcgtttcaaaactagacagaatcattctcagaaactgctctgcgatgtgtgccttcagctctcagagtttaacttttcttttcattcagcagtttggaaacactctgtttgtaaagtctgcacgtggatattttgaccacttagaggtcttcgttggaaacgggtttttgtcatgtaaggctagacagaagaattcccagtaacttccttgtgttgtgtgcattcaactcacagagttgaactttcccttagacggagcagatttgaaacactctatttgtgcaatttgcaagtgtagatttcaagcgctttaaggtcaatggcagaaaaggaaatatcttcgtttcaaaactagagagaatcattcccacaaactgcgttgtgatgtgttcgttcaactcacagagtttaacctttctgttcatagagcagttaggaaacactctgtttgtaaagtctgtaagtggatattctgacatcttgtggccttcgttggaaacgggatttcttcgtattctgctagacagaagaattctcagtaacttccttgtgttgtgtgtattcaactcacagagttgaacgatcctttacacagagcagacttgaaacactctttttgtgtaatttgcaagtggagatttcagccgctttgaggtcaatggtagaaaaggaaactatcttcatataaagactagacagaatgattctcagaaaatcttttgtgatgtgtgcgttcaactcacagagtttaacttttcttctcatagagcagttaggaaacactctgtttgtaaagtctgcaagtggatattcagacctctttgaggccttcgttggaaacgggatttcttcatattatgctagacagaagaattcccagtaacttccttgtgttgtgtgtgttcaactcacagagttgaactttcatttacacagagcagattggaaacactctttttgtggaatttgcaagtggagatttcaagcgctttgaggacaaaggcagaaaaggatatatcttcgtataaaaattagacagaaatcattctcagaaactgctctgcgatgtgtgcgttcaactctcagagtttaacttttcttttcattcagcagtgtggaaaaactctgtttgtaaagtctgcacgtggatattctgaccacttagaggccttcgttggaaacgggtttttttcctgtaaggctagacagaagaattcccagtaacttccttgtgttgtgtacattcaactcacagagttgaacgttcccttagacagaacagatttgaaacactctttttgtgcaattggcaagtggtgatttcagccgctttgaggtcaatggtagaaaaggaaatatcttcgtataaaaactagacagaatgattctcagaaactcctttgtgatgtgtgcgttcaactcacagagttttacctttcttttcatagagcagttaggaaacactctgtttgtaaagtctgcaagtggatattcagacctctttgaggccttcgttggaaacgggatttcttcatattatgctagacggaaggattctcagtaacttccttgtgttgtgtgtattcaactcacagagttgaacgatcctttacacagagcagacttgaaacactctttttgtggaatttgcaagtggagatttcagcctctttgaggtcaatggtagaaaaggagatatcttcgtataaaaactagacagaatgattctcagaaactcctttgtgatgtgtgcgttcaactcacagagtttaacctttcttttcatagagcagttaggaaacactctgtttgtaaagtctgcaagtggatattcagacctctttgaggccttcgttggaaacgggatttcttcatattatgctagacagaagaatttcccagtaacttccttgtgttgtgtgtgttcaactcacagagttgaactttcatttacacagagcagatttgaaacactctttttgtggaatttgcaagtggagatttcaagcgctttgaggccaaaggcagaaaaggaaatatcttcgtttcaaaactagacagaatcattctcagaaactgctctgcgatgtgtgcgtccaactctcagagtttaacttttcttttcattcagcagtttgcaaacactctgtttgtaaagtctgcacgtggatattttgaccacttagaggccttcgttggaaacgggtttttttcatgtaaggctagacagaagatttcccagtaacttccttgtgttgtgtacattcaactcacagagttgaacgttcccttaggcagagcagatttgaaacactctttttgtgcaattggcaaatggagatttcaagcgctttaaggtcaatggcagaaaaggaaatatcttcgtttcaaaactagacagaatcattcccacaaactgcgttgtgatgtgttcgttcaactcacagagtttaacctttctgttcatagagcagttaggaaacactctgtttgtaaagtctgtaagtggatattctgacatcttgtggccttcgttggaaacgggatttcttcatattctgctagacagaagaattctcagtaacttccttgtgttgtgtgtattcaactcacagagttgaacgatcctttacacagagcagacttgaaacactctttttgtggaatttgcaattggagatttcagccgctttgaggtcaatggtagaaaaggaaactatcttcatataaagattagacagaatgattctcagaaactcctttgtgatgtgtgagttcaactcacagagtttaacctttcttttcatagagcagttaggaaacactctgtttttaaagtctgcaagtggatattcagacctctttgaggccttcgttggaaacgggtttttttcatataaggctagagagaagaattctcagtaacttccttgtgttgtgtgtattcaactgacagagttgaactttcatttagacagagcagatttgaaacactatttatgtggaattggcaattggagatttcaacctctttgaggccaaaggcagaaaaggaaatatcttcgtttcaaaactagacagaatcattctcagaaactgctctgcgatgtgtgcgttcaactctcagagtttaacttttcttttcattcagcattttggaaacactctgtttgtaaagtctgcacgtggataatttgaccacttagaggccttcgttggaaacgggtttttttcatgtaaggctagacagaagaattcccagtaacttccttgtgttgtgtacattcaactcacagagttgaacgttcccttagacagagcagatttgaaacactctttttgtgcaattggcaagtggagatttcaagcgctttaaggtcaatggcagaaaaggaaatatcttcgtttcaaaactagacagaatcattcccacaaactgcgttgtgctgtgttcgttcaactcacagagattaacctttcttttcatagagcattaggaaacagtctgtttgtaaattctgtaagtggatattctgacatcttgtggccttcgttggaaacgggatttcttcatattctgctagacagaagaattctcagtaacttccttgtgttgtgtgtattcaactcacggagttgaacgatcctttacacagagcagacttgaaacactctttttgtggaatttgcaagtggagatttcagccgctttgaggtcaatggtagaataggaaatatcttcctatagaaactagacagaatgattctcagaaactcctttgtgatgtgtgcgttcaactcacagagtttaactttccttttcatagagcagttaggaaacactctgtttgtaaagtctgcaagtggatattcagacctctttgaggccttctttggaaacgggatttcttcatattctgatatacagaagaattcccagtaacttccttgtgttgtgtgtgttcaactcacagagttgaactttcatttacacagagcaggtttgaaacactctttttgtggtatttgcaaatggagatttcaagcgctttgtggccaaatgcagaaaaggaaatatcttcgtataaaaactagacagaatgattctcagaaaatcctttgtgatgtgtgcgttcaactcacagagtttaacttttcttttcatagagcaattaggaaacactctgtttgtaaagtctgcaagtggatattcagacctctttgaggccttcgttggaaacgggatttcttcatattatgctagacagaagaattctcagtaacttccttgtgttgtgtgcattcaactcacagagttgaacgttcccttagacagagcagatttgaaacactctatttgtgcaatttgcaagtgtagatttcaagcgcattaaggtcaaaggcagaaaaggaaatatcttcgtttcaaaactagacagaatcattcccacaaactgcgttgtgatgtgttcgttcaactcacagagtttaacctttcttttcatagagcagttaggaaacagtctgtttgtcaattctgtaagtggatattctgacatcttgtggccttcgttggaaacgggatttcttcatattctgctagacagaagaattctcagtaacttccttgtgttgtgtgtattcaactcacagagttgaacgatcctttacacagggcagacttgaaacactctttttgtggaatttgcaagtggagatttcagccgcgttgaggtcaatggtagaaaaggaaatatcttcgtataaaaactagacagaatgattctcagaaactcctttgtgatgtgtgcgttcaactcacagagttcaacctttcttttcatagagcagttgggaaacactctgtttgtaaagtctgcaagtggatattcagacttctttgaggccttcgttggaagcgggatttcttcatattctgctagacagaagaattctcagtaacttccttgtgttgtgtgtattcaactcacagagttgaacgatcctttacacagagcagacttgaaacactctttttgtggaatttgcaaggggagatttcagccgctttgaggtcaatggtagaataggaaatatcttcctatagaaactagacagaatcattctcagaaactgctctgcgatgtgtgcgttcaactctcagagtttaacttttcttttcattcagcagtttggaaacactctgtttgtaaagtctgcacgtggataatttgaccacttagaggccttcgttggaaacgggtttttttcatgtaaggctagacagaagaattcccagtaacttccctgtgttgtgtacattcaactcacagagttgaacgttcccttagacagagcagatttgaaacactctttttgtgcaattggcaagcggagatttcaagcgctttaaggtcaatggcagaaaaggaaatatcttcgtttcaaaactagacagaatcattatcaaaaactgcgttgtgatgtgttcgttcaactcacagagtttaacctttcttttcatagagcagttgggaaacagtctgtttgtaaattctgtaagtggatattctgacatcttgtggccttcgttggaaacgggatttcttcatattctgctagacagaagaattctcagtaacttccttgtgttgtgtgtattcaactcacagagttgaacgatcctttacacagagcagacttgaaacactctttttgtggaatttgcaagtggagatttcagccgctttgaggtcaatggtagaaaaggaaatatcttcgtataaaaactagacagaatgattctcagaaaatcttttgtgatgtgtgcgttcaactcacagagtttaacttttcttctcatagagcagttaggaaacactctgtttgtaaagtctgccagtggatattcagacctctttgaggtcttcgttggaaacgggatttcttcatattatgctagacagaagaattcccagtaacttccttgtgttgtgtgtgttgaactcacagagttgaactttcatttacacagagcagatttgaaacactctttttgtggaatttgcaagtggagatttcaagcgctttcaggccaaaggcagaaaaggaaatatcttcgtataaaaactagacagaatcattctcagaaactgctctgcgatgtgtgcgttcaactctcagagtttaacttttcttttcattcagcagtttggaaacactctgtttgtaaagtctgcacgtggataatttgaccacttagaggccttcgttggaaacgggtttttttcatgtaaggctagacagaagaattcccagtaacttccttgtgttgtgtacattcaactcacagagttgaacgttcccttagacagagcagatttgaaacactctttttgtgcaattggcaagtggagatttcaagcgctttaaggtcaatggcagaaaaggaaatatctgcgtttcaaaactagagagaacgattctcagaaactcctttgtgatgtgtgcgttcaactcacagcagtttaacctttctgttcatagagcagttaggaaacactctgtttgtaaaatctgcaagtggatattcagacctctttgaggccttcgttggaaacgggatttcttcatattctgctagacagaagaattctcagtaacttccttgtgttgtgtgtattcaactcacagagttgaacgatcctttacacagagcagacttgaaacactctttttgtggaatttgcaagtggagatttcagccgctttgaggtcaatagtcgaaaaggaaatatcttcgtagaaaaactagacagaatgattctcagaaacttctttgtgatgtgtgcgttcaactcacagagtttaacctttcttttcatagagcagttaggaaacactctgtttgtaaactctgcaagtggatattcagacctctttgaggccttcgttggaaacgggatttcttcatactatgctagacagaagaattctcagtaacttccttgtgttgtgtgtattcaactgacagagttgaactttcatttagacagaggagatttgaaacactctttttgtggaatttgcaagtggagatttcaagcgctttgaggccaaaggcagaaaaggaaatatcttcgtataaaaactagacagaatcattctcagaaactgctgcgtgatgtgtgcgttcaactctcagagtttaacttttcttttcattcagcggtttggaaacactctgtttgtaaagtctgcacgtggatattttgaccacttagaggccttcgttggaaacgggtttttttcatgaaggctagacagaaagaattcccagtaacttccttgtgttgtgtgcattcaactcacagagttgaacgttcccttaggcagagcagatttgaaacactctatttgtgcaatttgcaagtgtagatttcaagcgctttaaggtcaatggcagaaaaggaaatatcttcgtttcaaaactagacagatgattctcagaaacttcattgtgacgtgtgcgttcaactcacagagtttaacctttcttttcatagagcagttaggaaacactctgtttgtaaagtctacaagtggatattcagacctctttgaggccttcgttggaaacgggatttcttcatactgtgctagacagaagaattctcagtaacttccttgtgttgtgtgtattcaactcacagtagttgaacgatcctttacacagagcggacttgaaacacactttttgtggaatttgcaagtggagatttcagccgcgttgaggtcaatggtagaaaaggaaatatcttcgtataaaaactagacagaatgattctcagaaactcctttgtgatgtgtgtgttcaactcacagagtttaacctttcttttcatagagcagttaggaaacactctgtttgtaaagactgcaagtggatattcaggcctctttgaggccttcgttggaaacgggttttttcatataaggctagacagaagaattcccagtaacttccttgtgttgtgtgtgttcaactcacagagttgaactttcatttacacagagcagattggaaacactctttttgtggaatttgccagtggagatttcaagcgcattgaggccaaaggcagaaaaggaaatatcttcgtataaaaactagacagaatcattctcagaaactgctctgtgatgtgtgcgttcaactctcagagtttaacttttcttttcattcagcagtttggaaaccctctgtttgtaaagtctgcacgtggatattttgaccacttagaggccttcgttggaaacgggtttctttcctttaaggctagacagaagaattcccagtaacttccttgcgttgtgtacattcaactcacagagttgaacggttcccttagacagagcagatttgaaacactctttttgtgcaattggcaagtggagatttcaagcgctttaaggtcaatggcagaaaaggaaatatcttcgtttcaaaactagacagaatcattctcacaaactgcgttgtgatgtgttcgttcaactcacagagtttaacctttctgttcatagagcagttaggaaacactctgtttgtaaagtctgtaagtggatattctgacatcttgtggctttcgttggaaacgggatttcttcatattctgctagacagaataattctcagtaacttccttgtgttgtgtgtattcaactcacagagttgaacgatcctttacacagagcagacttgaaacactctttttgtggaatttgcaagtggagatttcagccgctttgaggtcaatagtagaaaaggaaatatcttcgtagaaaaactagacagaatgattctcataactcttttgtgatgtgtgcgttcaactcacagagttcaacctttcttttcatagagcagttgggaaacactctgtttgtaaagtctgcaagtggatattcagacttctttgaggccttcgttggaagcgggatttcttcatattctgctagacagaagaattctcagtaatttccttgtgttgtgtgtattcagctgacagagttgaactttcatttagagagagcagatttgaaacactgtttttgtggaatttgcaagtggatatttcaagcgatttgaggccaaaagcagaaaaggaaatatcttcgtataaaaactagacagaatcattctcagaaactgctctgcgatgtgtgcgttcaactctcagagtttaacttttcttttcattcagcagtttggaaacactctgtttgtaaagtctgcacgtggataatttgaccacttagaggccttcgttggaaacgggtttttttcatgtaaggctagacagaagaattctcagtaacttccttgtgttgtgtgtattcaactcacagagttgaacgatcctttacacagagcagacttgaaacactctttttgtggaatttgcaagtggagatttcagccgctttgaggtcaatggtagaaaaggaaatatcttcgtgtagaaacaagacagaatgattctcagaaactcctttgtgatgtgtgcgttcaactcacagagtttaacctttcttttcatagagcagttaggaaacactctgtttgtaaagtctgcaagtggatattcagacctctttgaggccttcgttggaaacggcatttcttcacattatgctagacagtttaattctcaataacttccttgtgttgtgtgtattcaactcacagagttgaacgatcctttacagagagcagacttgaaacactctttttgtggaatttgcaagtggagatttcagccgctttgaggtcagtggtagaataggaaatatcttcctatagaaactagacagaatgattctcagaaactcctttgtgatgtgtgcgttcaactcacagagtttaacctttcttttcatagagcagttaggaaacactctgtttgtaaagtctgcaagtggatattcagacctctttgaggccttcgttggaaacgggatttcttcatattctgctagacagaagaattctcagtaacttccttgtgttgtgtgtattcaactcttagagttgaacgatcctttacagagagcagacttgaaacactctttttgtggaatttgcaagtggagatttcagccgctttgaggtcaatggtagaataggaaatatcttcctatagaaactagacagaatcattctcagaaactgctgcgtgatgtgtgcgttcaactctcagagtttaacttttcttttcattcagcggtttggaaacactctgtttgtaaagtctgcacgtggatattttgaccacttagaggccttcgttggaaacgggtttttttcatgtaaggctagacagaagaattcccagtaacttccttgtgttgtgtgcattcaactcacagagttgaacgttcccttagacagagcagatttgaaacactctatttgtgcaatttgcaagtgtagatttcaagcgctttaaggtcaatggcagaaaaggaaatatcttcgtttcaaaactagacagtatcattcccacaaactgcgttgtgatgtgttcgttcaactcacagagtttaacctttctgttcatagagcagttaggaaacactctgtaaagtctgtaagtggatattctgacatcttgtggccttcgttgtaaacgggatttcttcatattctgctagacagaagaattctcagtaacttccttgtgttgtgtgtattcaactcacagagttgaacgatcctttacacagagcagacttgaaacactctttttgtggaatttgcaagtggagatttcagcctctttgaggtcaatggtagaataggaaatatcttcctatggaaactagacagaatgattctcagaaactcctttgtgatgtgtgcgttcaactcacagagtttaacctttcttttcatagagcagttgggaaacactctgtttgtaaagtctgcaagtggatattccgacatccttgaggctttcgttggaaacgggatttcttcatattctgctagaaagaagaattctcagtaacttccttgtgttgtgtgtattcaactcacagagttgaacgatcctttatacagagcagacttgaaacactctttttgtggaatttgcaagtggagatttcagccgctttgaggtcaatggtagaataggaaatatcttcctatagaaactagacagaacgattctcagaaactcctttgtgatgtgagcgttcaactcacagagtttaacctttcttttcatagagcagttaggaaacactctgtttgtaaagtctgcaagtggatattcagacctctttgaggccttcgttggaaacgggatttcttcatattctgctacacagaagaattcccagtaacttccttgtgttgtgtgcattccactcacagagttgaacgttcccttagacagagcagatttgaaacactctatttgtgcaatttgcaagtgtagatttcaagctctttaaggtcaatggcagaaaaggaaatatcttcgtttcaaaactagacagaatcattcccacaaactgcgttgcgatgtgttcgttcaactcacagagtttaacatttcttttcatagagcacttaggaaacagtctgtttgtaaattctgtaagtggatattctgacatcttgtggccttcgttggaaacaggatttcttcatattctgctagacagaagaattctcagtaacttccgggtgttgtgtgtattcaactcacagagttgaacgatcctttacacagagcagacttgaaacactctttttgtggaatttgcaagtggagatttcagccgctttgaggtcaatggtagaaaaggaaataccttcctataaaaactagacagaatgattctcataaactcctttgtgatgtgtgcgttcaactcacagagtttaacttttcttttcatagagcagttaggaaacactctgtttgtaaagtctgcaagtggatattcagacctccttgaggccttcgttggaaacgggatttcttcatattctgctagacagaagaattctcagtaacttccttgagttgtgtgtattcaactcacagagttgaacgatcctttacacagagcagacttgaaacattctttttgtggaatttgcaagtggagatttcagccgctttgaggtcaatggtagaataggaaatatcttcctatagaaactagacagaatcattctcagaaactgctgcgtgatgtgttcgttcaactctcagagtttaacttttcttttcattcagcggtttggaaacactctgtttgtaaagtctgcacgtggaaattttgaccacttagaggccttcgttggaaacgggtttttttcatgtaaggctagacagaagaattcccagtaacttccttgtgttgtgtgcattcaactcacagagttgaacgttcccttagacagagcagatttgaaacactctatttgtgcaatttgcaagtgtagatttcaagcgctttaaggtcaacggcagaaaaggaaatatcttcgtttcaaaactagacagaatgattctcagaaactcctttgtgatgtgtgcgttcaactcacagagtttaacctttcttttcatagagcctttaggaaacactctgtttgtaaagtctgcaagtggatattcagacctccctgaggccttcgtcggaaatgggatttcttcatattctgctagacagaagaattctcactaacttccttgtgttgtgtgtgttcaactcacagagttgaacgatcctttacacagagcagacttgaaacactctttttgtggaatttgcaagtggagatttcagccgctttgaggtcaatggtagaataggaaatatcttcctatagaaaatagacagaatgattctcagaaactcctttgtgatgtgggcgttcaactcacagagtttaacctttcttttcatagagcagttaggaaacactctgtttgtaaagtctgcacgtggatatttggacttctttgaggccttcgttggaaacgggtttttttcatgtaaggctagacggaagaattcccagtaacttctttgtgttgtgtgtgttcaactcacagagttgaactttgatttacacagagcagatttgaaacactctttttgtggaatttgcaagtggagatttcaagcgatttgaggccaaaggcagaaaaggaaatatcttcgtataaaaactagacagaatcattctcagaaactgctgcgtgatgtgtgcgttcaagtctcagagtttaacttttgttttcattcagcggtttggaaacactctgtttgtaaagtctgcacgtggaaattttgaccacttagaggccttcgttggaaacgggtttttttcatgtaaggctcgacagaagaattcccagtaacttccttgtgttgtgtacattcaactcacagagttgaacgttcccttagacagagcagatttgaaacactctttttgtgcaattggcaagtggagatttcaagcgctttgaggtcaatggcagaaaaggaaatatcttcgtttcaaaactagacagaatcattcccacaaactgcgttgtgatgtgttcgttcaactcacagagtttaacctttcttttcatagaccagttaggaaacagtctgtttgtcaattctgtaagtggatattctgacatcttgtggccttcgttggaaacgggatttcttcatattctgctagacagaagaattctcagtaacttccttgtgttgtgtgtattcaactcacagagttgaaggatcctttacagagagcaggcttgaaacactctttttgtcgaatttgcaagtggagatttcagccgctttgaggtcaatggtagaataggaaatatcttcctatagaaactagacagaatgattctcagaaactcctttgtgatgtgtgcgttcaactcacagagtttaacctttcttttcatagagcagttaggaaacactctgtttgtaaagtctgcaagtggatattcagacctctttgaggccttcgttggaatcgggtttttttcatataaggctagacagaagaattcccagtaacttccttgtgttgtgtgtgttcaactcacagagttgaactttcatttacacagagcagatttgaaacactctttttgaggaatttgcaagtggagatgtcaagcgctttgaggccaaaggcagaaaaggaaatatcttcgtataaaaactagacagaatgattgtcagaaactcctttgtgatgggtgtgttcaatttaaagagtttaacttttcttttcataaagcagttaggaaacactctgtttgtaaagtctgcaagtggatattttgacctatttgaggccttcgttggaaacgggtttttttcctgtaaggctagatagaagaattcccagtaacttccttgtgttgtgtacattcaactcacagtgttgaacgttcccttagacagagcagatttgaaacactctttttgtgcaattggcaagtggagatttcaagcgctttaaggtcaatggcagaaaaggaaatatcttcatttcaaaactagacagaatcattcccacaaactgcgttgtgatgtgttcgttcaactcacagggtttaacctttcttttcacagagcagttaggaaacactctgtttgtaaagtctgcacgtggatattttgacctctttgaggccttcgttggaaacgggttttttcatataaggctagacagaagaattctcagaatcttccttgtgttgtgtgtattcaactcacagagttgaacgatcctttacacagagcagacttgtaacactctttttgtggaatttgcaagtggagatttcagccgctttgaggtcaatggtagaaaaggaaatctcttcgtataaaaactagacagaatgattctcagaaactcctttgtgatgtgtgcgttcaactcacagagttcaacctttcttttcatagagcagttggaaaacactctgtttgtaaagtctgcaagtggatattcaaactttctttgaggccttcgttggaagcgggatatcttcatattctgctagacagaagaattcccagtaacttccttgtgttgtgtgtgttcaactcacagagttgaactttgatttacacagagcagatttgaaacactctttttgtggaatttgcaagtggagatttcaagcgctttgaggccaaaggcagaaaaggaaatatcttcgtataaaaagtagacagaatcattctcagaaactgctctgcgatgtgtgcgttcaactctcagagtttaacttttcttttcattcagcagtttggaaacactctgtttgtaaagtctgcacgtggatattttgaccacttagaggccttcgttggaaacgggtttttttcctgtaaggctagacagaagaattcccagtaacttccttgtgttgtgtgcattcaactcacagagttgaacgttcccttagacagagcagatttgaaacactctatttctgcaatttgcaagtgtagttttcaagctctttaaggtcaacggcagaaaaggaaatatcttcgtttcaaaactagacagaatcattcccacaaactgcgttgtgatgtgttcgttcaactcacagagtttaacctttctgttcatagagcagttaggaaacactctgtttctaaagtctgtaagtggatattctgacatcttgtggccttcgttggaaacgggatttcttcatattctgctagacagaagaattctcagtaactttccttgtgttgtgtgttttcaactcacagagttcaaccatcctttacacagagtagacttgaaacactctttttgtggaattggcagggtggagatttcagccgctttgaggtcaatggtagaaaagtaaatatcttcgtataaaaactagacagaatgattctcagaaactcctttgtgatgtgtgcgttcaactcacagagtttaacctttcttttcatagagcagttaggaaacactctgcttgtaaagtctgcatgtggatattcagccctctttgaggccttcgttggaaacgggtttttttcatataaggctagacagaagaattcccagtaacttccttgtgttgtgtgtgttcaactcacagagttgaactttcatttacacagagcagatttgaaacactctttttgtggaatttgcaagtggagatttcaagcgctttgaggccaaaggcagaaaaggaaatatcttcgtataaaaactagacagaatcattctcagaaactgctgcgtgatgtgtgcgttcaactctcagcagtttaacttttcttttcattcagcggtttggaaacactctgtttgtaaagtctgcacgtggatattttgaccacttagagaccttcgttggaaacgggtttttttcatgtaaggctagacagaagaattcccagtaacttccttgtgttgtgtacattcaactcacagagttgaacgttcccttagacagagcagatttgaaacactctttttgtgcaattggcaagtggagatttcaagcgctttaaggtcaattgcagaaaaggaaatatcttcgtttcaaaactagacagaatgattctcagaaactcctttgtgatgtgtgcgttcaactcacagagtttaacctttcttttcatagatcagttaggaaacactctgtttgtaaagtctgcaagtgaatattcagacctctttgaggtcttcgttggaaacgggatttcttcatattctgctagacagaagaattctcagtaacttccttgtgttgtgtgtattcaactcacagagttgaacgatcctttacacagagcagacttgaaacactctttttgtggaatttgcaagtggagatttcagccgctttgaggtcaatggtagaaaaggaaactatcttcatataaagactagacagaatgattctcagaaaatcttttgtgatgtgtgcgttcaactcacagagtttaactattcttctcatagagcagttaggaaacactctgtttgtaaagtctgcaagtggatattcagacctctttgaggccttcgttggaaacgggatttcttcatattatgctagacagaagaattctcagtaacttccttgtgttgtgtgtattcaactcacagagttgaactttcatttacacagagcagatttgaaacactctttttgaggaatttgcaaatggagaattcaagcgttttgaggccaaaggcagaaaaggaaatatcttcgtataaaaactagacagaatcattctcagaaactgctctgcgatgtgtgcattcaactctcagagtttaatttttcttttcattcagcagtttggaaacactctctttgtaaagtctgcacgtggatattttgaccacttagaggccttcgttggaaacgggttttattcctgtaagtctagacagaagaattcccagtaacttccttgtgttgtgtacattcaactcacagagttgaacgttcccttagacagagcagatttgaaacactctttttgtgcaattggcaagtggagatttcaagcgctttaaggtcaatggcagaaaaggaaatatcttcgtttcaaaactagacagaatgattctcagaaactcctttgtgatgtgtgcgttcaactcacagagtttaacctttcttttcatagagcagttgggaaacactctgtttgtaaagtctgcaagtggatattcagacctctttgacgccttcgttggaaacgggatttcttcatattctgctagacagaagaattctcagtaactttccttgtgttgtgtgtattcaactcacagagttgaacgatcctttacacagagcagacttgaaacactctttttgcggaatttgcaagtggagatttcagccgctttgaggtcaatggtagaataggaaatatcttcctatagaaactagacagagtgattctcagaaactcctttgtgatgtctgcgttcaactcacagagtttaacctttcttttcatagagcagttaggaaacactctgtttgtaaagtctgcaagtggatattcagacctccttgaggccttcgttggaaacgggatttcttcatattctgctatacagaggaattctcagtaacttccttgtgttgtgtgtattcaactgacagagttaaactttcatttagagagagcagatttgaaacactgtttttgtggaatttgcaagtggagatttcaagcgctttggggccaaaggcagaaaaggaaatatcttcgtataaaaactagacagaatcattctcagaaactgctctgcgatgtgtgcgttcaactctcagagtttaacttttcttttcattcagcagtttggaaacactctgtttgtaacgtctgcacgtgaataatttgaccacttagaggccttcgttggaaacgggtttttttcatgtaaggctagacagaagaattctcagtaacttccttgtgttgtgtgtattcaactcacagagttgaacgatcctttacacagagcagacttgtaacacgctttttgtggaatttgcaagtggagatttcagccgctttgaagtcaaatgtagaaaaggaaatatcttcctataaaaactagacagaatcattcccacaaactgcgttgtgatgtgttcgttcaactcacagagtttaacctttcttttcatagagcagttaggaaacagtctgtttgtcaattctgtaagtggatattctgacatcttgtggccttcgttggaaacgggatttcttcatattctgctagacagaagaattctcagtaacttccgcgtgttgtgtgtattcaactcacagagttgaacgatcctttacacagagcagacttgtaacactctatttggggaatttgcaagtggagatttcagccgctttgaagtcaaaggtagaaaaggaaatatcttcctataaaaactagacagaatgattctcagaaactcctttgtgatgtgtgcgttcaactcacagagtttaacctttcttttcatagagcagttaggaaacactctgtttgtaaagtctgcaaatggatattcagacctctctgaggccttcgttggaaacgggctttttcatataaggctagacagaagaattctcagtaacttccttgtgttgtgtgtattcaactgacagagttgaactttcatttagagagagcagatttgaaacactgtttttgtggaatttgcaagtggagatttcaagcgctttggggccaagggcagaaaaggaaatatcttcgtataaaaacaagacagaatcattctcagaaactgctgcgtgatgtgtgcgttcaactctcagagtttaacttttcttttcattcagcggtttggaaacactctgtttgtaaagtctgcacgtggacattttgaccacttagagtccttcgttggaaacgggtttttttcatgtaaggctagacagaagaattcccagaaacttccttgtgttgtgtgcattcaactcacagagttgaacgttcccttagacagagcagatttgaaacactctatttgtgcaatttgcaagtgtagatttcaagcgctttaaggtcaatggcagaaaaggaaatatcttcgtttcaaaactagacagaatcattcccacaaactgcgttgtgatgtgttcgttcaactcacagagtttaacctttcttttcatagagcagttaggaaacagtctgtttgtcaattctgtaagtggatattctgacatcttgtggccttcgttggaaacgggatttcttcatattctgctagacagaataattctcagtaacttccttgtgttgtgtgtattcaactcacagagttgaacgatcctttacatagagcagacttgaaacactctttttgtggaatttgcaagtggagatttcagccgctttgaggtcaatagtagaaaaggaaatatcttcgtagaaaaactagacagaatgattctcagaaactcctttgtgatgtgtgcgttcaactcacagtagtttaacttttcttttcatagagcagttaggaaacactctgtttgtaaagtctgcaagtggatattcagacctctttgaggccttcgttggaaacgggatttcttcatattatgctagacagaagaattcccagtaacttccttgtgttgtgtgtgttcaactcacagagttgaactttcatttacacagagcagatttgaaacactctttttgtggaatttgcaagtggagatttcaagcgctttgaggccaaaggcagaaaaggaaatatcttcgtataaaaactagacagaatcattttcagaaactgctctgcgatgtgtgcgttcaactctcagagtttgacttttcttttcattcagcagtttggaaacactctgtttgtaaagtctgcacgtggataatttgaccacttagaggccttcgtgggaaacgggtttttttcatgtaaggctagacagaagaattcccagtaacttccttgtgttgtgtgcattcaactcacagagttgaacgttcccttagacagagcagatttgaaacactctatttgtgcaatttgcaagtgtagatttcaagcgctttaaggtcaacggcagaaaaggaaatatcttcgtttcaaaactagacagaatcattcccacgaactacgttgtgatgtgttcgttcaactcacagagtttaacctttcttttcatagagcagttaggaaacagtctgtttgtaaattctgtaagtggatattctgacatcttgtggccttcgttggaaacgggatttcttcatattctgctagacagaagaattctcagtaacttccttgtgttgtgtgtattcaactcacagagttgaacgatcctttacacagagcagacttgaaacactctttgtgtggaatttgcaagtggagatttcagccgctttgagttcaatggtagaataggaaatatcttcctatagaaactagacagaatgattctcagaaactcctttgtgatgtgtgcgttcaactcacagagtttaacctttcttttcatagagcagttaggaaacactctgtttgtaaagtctgcaagtggatattcagacctccttgaggccttctttggaaacgggatttcttcatattatgctagacagaagaattctcagtaacttccttgtgttgtgtgtattcaactcacagagttgaacgatcctttacacagagcatacttgaaacactcttcttgtggaatttgcaagtggagatttcagccgctttgaggtcaactgtagaataggaaatatcttcctatagaaactagacagaaatgattctcagaaactcttttgtgatgtgtgcgttcaactcacagagtttaacctttctgttcatagagcagttaggaaacactctgtttgtaaagtctgcaagtggatattcagacctccttggggccttcgttggaaacgggatttcttcatattctgctagacagaagaattcccagtaacttccttgtgttgtgtacattcaactcacagagttgaacgttcccttagacagagcagatttgaaacactctttttgtgcaattggcaaatggagatttcaagcgctttaaggtcaatggcagaaaaggaaatatcttcgtttcaaaactagacagaatcattcccacaaactgcgttgtgatgtgttcgttcaactcacagagtttaacctttcttttcatagagcagttaggaaacagtctgtttgaaaattctgtaagtggatattctgacatcttgtggccttcgttggaaacgggatttcttcatattctgctagacagaagaattctcagtaccttccttgtgttgtgtgtattcaactcacagagttgaacgatcctttacacagagcagacttgaaacactctttttgtgaaatttgcaactggagatttaagccgctttgtggtcaatggtataataggaaatatcttcctatagaaactagacagaatgattctgagaaactcctttgtgatgtgtgcgttcaactcacagagtttaacctttcttttcatagagcagttaggaaacactctgtttgtaaagtctgcaagtggatattcagacctccttgaggccttcgttggaaacgggatttcttcatattatgctagacagaagaattctcagtaacttccttgtgttttgtgtattcaactcacagagttgaacgatcctttacacagagcagacttgaaacactctttttgtggaatttgcaagtggagatttcagccgctttgagttcaatggtagaataggaaatatcttcctatggaaactagacagaatcattctcagaaactgctgcgtgatgtgtgcgttcaactctcagagtttaacttttctttgcattcagcggtttggaaacactctgtttgtaaagtctgcacgtggatattttgaccacttagaggccttcgttggaaacgggtttttttcatgtaaggctagacagaagaattcccagtaacttccttgtgttgtgtgcattcaactcacagagttgaacgttcccttagacagagcagatttgaaacactctatttgtgcaatttgcaagtgtagatttcaagcgcattaaggtcaatggcagaaaaggaaatatcttcgtttcaaaattagacagaatcattcccacaaactgcgttgtgatgtgttcgttcaactcacagagtttaacctttctgttcatagagcagttaggaaacactctgtttgtaaagtctgtaagtagatattctgacatcttgtggccttcgttggaaacgggatttcttcatattctgctagacagaagaattctcagtaacttccttgtgttgtgtgtattcaactcacagagttgaacgatcctttacacagagcagacttgaaacactctttttgtggaatttgcaagtggagatttcagccgctttgaggtcaatggtagaaaaggaaactatcttcatataaagattagacagaatgattctcagaaactcctttgtgatgtgtgcgttcaactcacagagtttaacctttcttttcatagagcagttgggaaacactctgtttgtaaagtctgcaagtggatattcagacatccttgaggctttcgttggaaacgggatttcttcatattctgctagaaagaagaattctcagtaacttccttgtgttgtgtgtattcaactcacagagttgaacgatcctttacacagagcagacttgaaacactcttcttgcggaatttgcaagtggagatttcagccgctttgaggtcaatggtagaataggaaatatcttcctatagaaactagacagaatcattctcagaaactgctctgcgatgtgtgcgttcaactctcagagtttaacttttcttttcattcagcagtttggaaacactctgtttgtaaagtctgcacgtggatattttgaccacttagaggccttcgttggaaatgggtttttttcctgtaaggctagacagaagaattctcagcaacttccttgtgttgtgtgtattcaactcacagagttgaacgatcctttgagcagacttgagaaactctttttgtggaatttgcaagtggagatttcagccggtttgaggtcaatggtagaaaaggaaatatcttcgaataaaaactagacagaatgattctcagaaactcctttatgatgtgtgcgttcaactctcagagtttaaccttccttttcataaagcagttaggaaacactctgtttgtaaagtctgcaagtggataatcagacctctttgaggccttcgttggaaacgggattttttcatattctgctagacagaagaattctcagtaacttcctcgtgttgtgtgtattcaactcacagagttgaacgatcctttacacagagcagacttgaaacactctttttgtggaatttgcaaatggagatttcagccgctttgaggtcagtggttgaaaaggaaatatcttcatataaaaattagacagaatgattctcagaaacttctttgtgatgtgtgcgttcaactcacagagtttaacctttcttttcatagagcagttatgaaacactctgtttgtaaactctgcaagtggatattcagacctctttgaggccttcgttggaaacgggatttcttcatactgtgctagacagaagaattcccagtaacttccttgtgatgtgtgtgttcaactcacagagttcaactttcatttacacagagcagatttgaaacactctttttgtggaatttgcaagtggagatttcaagcgctttgaggccaaaggcagaaaaggaaatatcttcgtataaaaactacacagaatgattctcagaaactcctttgtgatgtgtgcgttcaactcacagagtttaacctttcttttcatagagcagttaggaaacactctgtttgtaaagtctgcaagtgatattcagacctctttgaggccttcgttggaaacgggtttttttcatataaggctagacagaagaattcccagtaacttccttgtgttgtgtacattcaactcacagagttgaaccgttcccttagacagagcagatttgaaacactctttttgtgcaattggcaagtggagatttcaagcgctttgaggtcaatggcagaaaaggaaatatcttcgtttcaaaactagacagaatgattctcagaaacttctttgtgatgtgtgcgttcaactcacacagtttaacctttcttttcatagagcagttaggaaacactctgtttgtaaactctgcaagtggatattcagacctctttgaggccttcgttggaaacgggatttctccatactgtgctagacagaagaattctcagtaacttccttgtgttgtgtgtattcaactcacagagttgaacgatcctttacacagagcggacttgaaacactcgttttgtggaatttgcaagtggagatttcagccgcgttgaggtcaatggtagaaaaggaaatatcttcgtataaaaactagacagaatgattctgaaaactcctttgtgatgtgtgcgttcaactcacacagtttaacctttcttttcatagagcagttaggaaacactctgtttgtaaagtctgcaagtggatattcagacctccttgaggccttcgttggaaacgggatttcttcatattatgctagacagaagaattctcagtaacttccttgtgttgtgtgtattaaactgacagagttgaactttcatttagagagagcagatttgaaacactgtttttgtggaatttgcaagtggagatttcaagcgctttggggccaaaggcagaaaaggaaatatcttcgtataaaaactagacagaatcattctcagaaactgctctgcgatgtgtgcgttcaactctcagagtttaacttttcttttcattcagcagtttggaaacattctgtttgtaaagtctgcacgtggatattttgaccacttagaggccttcgttggaaacgggtttttttcctgtaaggctagacagaagaattcccagtaacttccttgtgttgtgtacattcaactcacagagttgaacgttcccttagacagaacagatttgaaacactctttttgtgcaattggcaaatggagatttcaagcgctttgagatcaatggtagaaaaggaaatatcttcgtttcaaaactagacagaatcattcccacaaactgcgttgtgatgtgttcgttcaacctacagtgtttaacctttcttttcatagagcagttaggaaacagtctgtttgtaaattctgtaagtggatattctgacatcttgtggccttggttggaaacgggatttcttcatattctgctagacagaagaattctcagaatcttccttgtgttgtgtgtattcaactcacagagttgaacgatggtttacacagagcagatttgaaacactctttttgtggaatttgcaagtggagatttcagccgctttgaggtcaatggtagaaaaggaaatatcttcgtataaaaactagacagaatgattctcagaaacttcattgtgttgtgtgcgttcaactcacagagtttaacctttcttttcatagagcagttaggaaacactctgtttgtaaactctgcaagtggatattcagagctctttgaggccttcgttggaaacgggatttcttcatactgtgctagacagaagaattcccagtaacttccttgtgttgtgtgtgttcaactcacagagttgaactttgatttacacagagcagatttgaaacactctttttgtggaatttgcaagtggagatttcaagcgctttgaggccaaaggcagaaaaggaaatatcttcgtataaaaactagacagaatcattctcagacactgctctgcgatgtgtgcgttcaactctcagagtttaacttttcttttcattcagcagtttggaaacactctgtttgtaaagtctgcacgtggatattttgaccacttagaggccttcgttggaaacgggtttttttcctgtaaggctagacagaagaattcccagtaacttccttgtgttgtgtacattcaactcacagagttgaacgttcccttagacagagcagatttgaaacactctttttgtgcaattggcaaatggagatttcaagcgctttaaggtcaatggcagaaaaggaaatatcttcgtttcaaaactagacagaacgattctcagaaattcctttgtgatgtgtgcgttcaactcacagagtttaacctttcttttcatagagcagttaggaaacactctgtttgaaaagtctgcaagtggatattcagacctctttgaggccttcgttggaaacgggatttcttcatattctgctagacagaagaattctcagtaacttccttgtgttgtgtgtattcaactcacagagttgaacgatcgtttacacagagcagacttgaaacactctttttgtggaatttgcaagtggagatttcagccgctttgaggtcaatagtagaaaaggaaatatcttcggagaaaaactagacagaatgattctcagaaactcctttgtgatgtgtgtgttcaactcacagagtttaacctttcttttcatagagcagttaggaaacactctgtttgtaaagtctgcaagtggatattcagacctctttgaggccttcgttggaaacgggtttttttcatataaggctagacagaagaattcccagtaacttccttgtgttgtgtgtgttcaactcacagagttgaactttcatttacacagagcagatttgaaacactctttttgtggaatttgcaagtggagatttcaagcgctttgaggccaaaggcagaaaaggaaatatacttcgtataaaaactagacagaatcattctcagaaactgctctgcgatgtgtgcgttcaactctcagaagtttaacttttcttttcattcagcagtttggaaacactctgtttgtaaagtctgcacgtggataacttgaccacttagaggccttcgttggaaacgggtttttttcatgtaaggctagacagaagaattcccagtaacttccttgcgttgtgtacattcaactcacagagttgaacgttcccttagacagagcagatttgaaacactctttttgtgcaattggcaagtggagatttcaagcgctttaaggtcaatggcagaaaaggaaatatcttcgtttcaaaactagacagaatgattctcagaaactcctttgtgatgtgtgcgttcaactcacagagtttaacttttcttttcatagagcagtaaggaaacactctgtttgtaaagtctgcaagtggatattcagacctctttgaggccttcgttggaaacgggatttcttcatattatgctagacagaataattctcagtaacttccttgtgttgtgtgtattcaactcacagagttgaacgatcctttacagagagcagacttgaaacactctttttgtggaatttgcaagtggagatttcagccgctttgaggtcaatggtagaaaaggaaatatcttcgtataaagactagacagaatgattctcagaaactcctttgtgatgtgtgcgttcaactcacagagtttaacctttcttttcatagagcagttaggaaacactctgtttgtaaagtctgcaagtggatattcagacctccttgaggtcttcgttggaaacgggatttcttcatattctgctagacagaagaattctcagtaacttccttgtgttgtgtgtattcaactgacagagttgaactttcatttacagagagcagatttgaaacactgtttttgtggaatttgcaagtggagatttcaagcgctttggggccaaaggcagaaaaggaaatatcttcgtgtaaaaactagacagaatcattctcagaaactgctgcgtgatgtgtgctttcaactctcagagtttaacttttcttttcattcagcggtttggaaacactctgtttgtaaagtctgcacgtggatattttgaccacttagaggcctacgttggaaacgggtttttttcatgtaaggctagacagaagaattcccagtaacttccttgtgttgtgtgcattcaactcacagagttgaacgttcccttagacagagcagatttgaaacactctatttgtgcaatttgcaagtgtagatttcaagcgctttaaggtcaatggcagaaaaggaaatatcttcgtttcaaaactagacagaatcattcccacaaactgcgttgtgatatgttcgttcaactcacagagtttaacctttctgttcatagagcagttaggaaacactctgtttgtaaagtctgtaagtggatattctgacatcttgtggccttcgttggaaacgggatttcttcatattctgctagacagaagaattctcagtaacttccttgtgttgtgtgtattcaactcacagagttgaacgatcctttacacagagcggacttgaaacactctttttgtgaaatttgcaagtggagatttcagccgcgttgaggtcaatggtagaaaaggaaatatcttcgtataaaaactagacagaatgattctcataaactcctttgtgatgtgtgcgttcaactcacagagtttaacctttcttttcatagagcagttaggagacactctgtttgtaaagtctgcaagtggatattcagacctctttgaggccttcgttggaaaagggatttcttcatattatgctagacagaagaattctcagtaacttccttgtgttgtgtgtattcaactgacagagttgaactttcatttagagagagcagatttgaaacactgtttttgtggaatttgcaagtggagatttcaagcgctttggggccaaaggcagaaaaggaaatatcttcgtataaaaactagacagaatcattctcagaaaccgctctgtgatgtgtgcgttcaagtctcagagtttaacttttcttttcattcagcagtttggaaacactctgtttgtaaagtctgcacgtggatattttgacaacttagaggccttcgttggaaacgggttttttttcacgtaaggctagacagaagaattcccagtaacttccttgtgttgtgtacattcaactcacagagttgaacgttcccttagacagagcagatttgaaacactctttttgtgcaattggcaaatggagatttcaagcgctttaaggtcaatggcagaaaaggaaatatcttcgtttcaaaactagacagaatcattcccacaaactgcgttgtgatgtgttcggtcaactcacagagtttaacctttcttttcatagagcagttaggaaacagtctgtttgtaaattctgtaagtggatattctgacatcttgtggccttcgttggaaacgggatttcttcatattctgctagacagaagaattctcagtaacttccttgtgttgtgtgtattcaactcacagagttgaacgatcctttacactgagcagacttgaaacactctttttgtggaatttgcaagtggagatttcagccgctttgaggtcaatggtagaaaaggaaatatcttcgtataaagactagacagaatgattctcagaaactcctttgtgatgtgtgcgttcaactcacagagtttaacttttcttttcatagagcagttaggaaacactctgtttgtaaagtctgcaagtggatattcagacctctttgaggccttcgttggaaacgggatttcttcatattatgctagacagaataattctcagtaacttccttgtgttgtgtgtattccactcacagagttgaacgatcctttacggagagcagacttgaaacactctttttgtggaatttgcaagtggagatttcagccgctttgaggtcaatggtagaataggaaatatcttcctatggaaactagacagaatcattctcagaaactgctctgcgatgtgtgcgttcaactctcagagtttaacttttcttttcattcagcagtttggaaacactctgtttgtaaagtctgcacgtggatattttgaccacttagaggccttcgttggaaacgggtttttttcctgtaaggctagacagaagaattcccagtaacttccttgtgttgggtgcattcaactcacagagttgaacgttcccttagacagagcagatttgaaacactctatttgtgcaatttgcaagtgtagatttcaagcgctttaaggtcaatggcagaaaaggaaatatcttcgtttcaaaactagacagaatcgttcccacaaactgcgttgtgatgtgttcgttcaactcacagagtttaacctttctgttcatagagcagttaggaaacactctgtttgtaaagtctgtaagtggatattctgacatcttgtggccttcgttggaaacgggatttcttcatattctgctagacagaagaattctcagtaacttccttgtgttgtgtgtattcaactcacagagttgaatgatcctttacacagaacagtcttgaaacactctttttgtggaatttgcaagtggagatttcagccgctttgaggtcaatggtagaataggaaatatcttcctatagaaaatagacagaatgattctcagaaactcctttgtgatgtgtgcgttcaactcacacagtttaacctttcttttcatagagcagttaggaaacactctgtttgtaaagtctgcaagtggatattcagacctctttgaggccttcgttggaaacgggattttttcatattatgctagacagaagaattctcagtaacttccttgtgttgtgtgtattcaactgacagagttgaactttcatttagaccgagcagatttgaaacactctttttgtggaatttgcaagtggagatttcaagcgctttgaggccaaaggcagaaaaggaaatatcttcgtataaaaactagacagaatcattctcagaaactgctgcgtgatgtgtgcgttcaactctcagagtttaacttttcttttcattcagcggtttggaaacactctgtttgtaaagtctgcacgtggacattttgaccccttagaggccttcgttggaaacgggtttttttcatgtaaggctagacagaagaattcccagtaacttccttgtgttgtgtgcattcaactcacagagttgaacgttcccttagacagagcagatttgaaacactctatttgtgcaatttgcaagtgtagatttcaagcgctttaaggtcaacggcagaaaaggaaatatcttcgtttcaaaactagacagaatgattctcagaaactcctttgtgatgtgtgcgttcaactcacagagtttaacctttcttttcatagagtagttaggaaacactctgtttgtgaagtctgccagtggatattcagacctctttgaggccttcgttggaaacggggtttcttcatattatgctagacagaagaattctcaataacttccttgtgttgtgtgcattcaactcacagagttgaatgatcctttacacagagcagattagaaacactctttttgtggaatttgcaagtggagatttcagccgctttgaggtcaatggtagaaaaggaaatatcttcgtataaaaactagacagaatgattctcagaaactcctttgtgatgtgtgcgttcaactcacagagtttaacctttcttttcatagagcagttaggaaacactctgtttgtaaagtctgcaagtggatattcagacctcttagaggccttcgttggaaacgggatttcttcatactctagacagaagaattcccagtaacttccttgtgttgtgtgtgttcaactcacagagttgaactttcatttacacagaggagatttgaaacactctttttgtggaatttgcaaatggagatttcaagcgctttgaggccaaaggcagaaaaggaaatatcttcgtataaaaactagacagaatcattctcagaaactgctctgcgatgtgtgcgttcaactctcagagtttaacttttcttttcattcagcagtttggaaacactctgtttgtaaagtctgcacgtggatattttgaccacttagaggccttcgttggaaacgggtttttttcctgtaaggctagacagaagaattcccagtaacttccttgtgttgtgtgcattcaactcacagagttgaacgttcccttagacagagcagatttgaaacactctatttgtgcaatttgcaagtgtagttttcaagctctttaaggtcaacggcagaaaaggaaatatcttggtttcaaaactagacagaatcattcccacaaactgcgttgtgatgtgttcattcaactcacagagcttaacctttctgttcatagagcagttaggaaacactctgtttgtaaagtctgtaagtggatattctgacatcttgtggccttcgttggaaacgggatttcttcatattctgctagacagaagaattctcattaacttccttgtgttgtgtgtattcaactcacagagttgaacgatcctttacacagagcagacttgaaacattctttttgtggaatttgcaagtggagatttcagccgctttgaggtcaatggtagaataggaaatatcttcctatagaaactagacagaatgattctcagaaaatcttttgtgatgtgtgcgttcaactcacagagtttaacttttcttctcatagagcagttaggaaacactctgtttataaagtctgcaagtggatattcagacctctttgaggccttcgttggaaacgggatttcttcatattctgctagacagaagaattcccagtaacttccttgtgttgtgtgtgttcaactcacagagttgaactttgatttacagagcagatttgaaacactctttttgtggaatgtgcaagtggagatttcaagcgctgtgaggccaaaggcagaaaaggatatatcttcgtataaaaactagacagaatcattctcagaaactgctctgcgatgtgtgcgttcaactctcagagtttaacttttcttttcattcagcagtttggaaacactctgtttgtaaagtctgcacgtggatattttgaccacttagaggccttcgttggaaacgggtttttttcctgtaaggctagacagaagaattcccagtaacttccttgtgttgtgtgcattcaactcacagagttgaacgttcccttagacagagcagatttgaaacactctatttgtgcaatttgcaagtgtagatttcaagcgctttaaggtgaatggcagaaaaggaaatatcttcgtttcaaaactagacagaatgattctcagaaactcctttgtgatgtgtgcgttcaactcacagagtttaacctttcttttcatagagcagttaggaaacactctgtttgtaaagtctggaagtggatattcagacatccttgaggctttcgttggaaacgggatttcttcatattctgctagaaagaagaattctcagtaacttccttgtgttgtgtgtattcaactcacagagttgaacgatcctttacacagagcagacttgaaacactctttttgtggaatttgcaagtggagatttcagccgctttgagttcaatggtagaataggaaatatcttcctatagaaactagacagaatgattctcataaactcctttgtgatgtgtgcgttcaactcacagagtttaacctttcttttcatagagcagttaggaaacactctgtttgtaaagtctgcaagtggatattcagacctctttgaggccttcgttggaaacgggatttcttcatattatgctagacagaagaattctcagtaacttccttgtgttgtgtgtattcaactgacagagttgaagtttcattaagagagagcagatttgaaacactgtttttgtggaatttgcaagtggagatttcaagcgctttggggccaaaggcagaaaaggaaatatcttcgtataaaaactagacagaatcattctcagaaactgctgcgtgatgtgtgcgttcaactctcagagtttaacttttccttttcattcagcggtttggaaacactctgtttgtaaagtctgcacgtggatattttgaccacttagaggccttcgttggaaacgggtttttttcatgtaaggctagacagaagaattcccagtaacttccttgtgttgtgtacattcaactcacagagttgaacgttcccttagacagagcagatttgaaacactctttttgtgcaattggcaaatggagatttcaagcgctttaagttcaatggcagaaaaggaaatatcttcgtttcaaaactagacagaatcattcccacaaactgcgttgtgatgtgttcgttcaactcacagagtttaacctttcttttcatagagcacttaggaaacagtctgtttgtaaattctgtaagtggatattctgacatcttgtggccttcgttggaaacgggatttcttcatattctgctagacagaataattctcagtaacttccttgtgttctgtgtattcaacttacagagttgaacgatcctttacagagagcagacttgaaacactctttttgtggaatttgcaagtggagatttcagccgctttgaggtcaatggtagaaaaggaaatatcttcgtataaagactagacagaatgattctcagaaactcctttgtgatgtgtgcgttcaactcacagagttcaacttttcttttcatagagcagttaggaaacactctgtttgtaaagtctgcaagtggatattcagacctctttgaggccttcgttggaaacgggatttcttcatattctgcaagacagaagaattctcagtaacttccttgtgttctgtgtattcaactcacagagttgaacgatcctttacacagagcagacttgaaacactctttttgtggaatttgcaagtggagatttcagccgctttgaggtcaatggtagaaaaggaaatatcttcgtataaagactagacagaatcattctcagaaactgctctgcgatgtgtgcgttcaactctcagagtttaacttttcttttcattcagcagtttggaaacactctgtttgtacagtctgcacgtggataatttgaccacttagaggccttcgttggaaacgggtttttttcatgtaaggctagacagaagaattctcagtaacttccttgtgttgtgtgtattcaactcacagagttgaacgatcctttacacagagcagacttgtaacactctttttgtggaatttgcaagtggagatttcagccgctttgaagtcaaatgtagaaaaggaaatatcttcctataaacactagacagaatcattcccacaaactgcgttgtgatgtgttcgttcaactcacagagtttaacctttcttttcatagagcagttaggaaacagtctgtttgtcaattctgtaagtggatattctgacatcttgtggccttcgttggaaacgggatttcttcatattctgctagacagaagaattctcagaaacttccttgtgttgtgtgtattcaactcacagagttgaacgatcgtttacacagagcagacttgagacactctttttgtggaatttgcaagtggagatttcagccgctttgaggtcaatggtagaaaaggaaatatcttcatataaaaactagacagaatgattctcagaatcttctttgtgatgtgtgcgttcaactcacagagtttaacctttcttttcatagagcagttaggaaacactctgtttgtaaattctgcaagtggatattcagacctcattgaggccttcgttggaaacgggatttcttcatactatgctagacagaagaattctcagtaacttccttgtgttgtgtgtattcaactgacagagttgaactttcatttagagagagcagatttgaaacactgtttttgtggaatttgcaagtggagatttcaagcgctttggggccaaaggcagaaaaggaaatatcttcgtataaaaactagacagaatcattctcagaaactgctctgcgatgtgtgcgttcaactctcagagtttaacttttcttttcattcagcagtttggaaacactctgtttgtaaagtctgcacgtgtatattttgaccacttagaggccttcgttggaaacgggtttttttcctgtaaggctagacagaagaattcccagtaacttccttgtgttgtgtacattcaactcacagagttgaacgttcccttagacagagcagatttgaaacactctttttgtgcaattggcaaatggagatttcaagcgctttaaggtcaatggcagaaatggaaatatcttcgtttcaaaactagacagaatcattcccacaaactgcgtagtgatgtgttcgttcaactcacagagtttaacctttcttttcatagagcagttaggaaacagtctgtttgtcaattctgtaagtggatattctgacatcttgtggccttcgttggaaacgggatttcttcatattctgctagacagaagaattcccagtaacttccttttgttgtgtacattcaactcacagagttgaacgttcccttagacagagcagacttgtaacactctttttgtggaatttgcaagtggagatttcagccgctttgaagtcaaaggtagaaaaggaaatatcttcctataaaaactagacagaatgattctcagaaactcctttgtgatgtgtgcgttcaactcacagagtttaacctttcttttcatagagcagttaggaaacactctgtttgtaaagtctgcaagtggatattcagacctctttgaggccttcgttggaaacgggtttttttcatataaggctagacagaagaattcccagtaacttccttgtgttgtgtgtgttcaactcacagagttgaactttcatttacccagaacagatttgaaacactctttttgtggaatttgcaagtggagatttcaagcactttgaggccaaaggcagaaaaggaaatatcttcgtttcaaaactagacagaatcattctcagaaactgctgcgtgatgtgtgcgttcaactctcagagtttaacttttcttttcattcagtggtttggaaacactctgtttgtaaagtctgcacgtggatattttgaccacttagaggccttcgttggaaacgggtttttttcatgtaaggctagacagaagaattcccagtaacttccttgtgttgtgtacattcaactcacagagttgaacgttcccttagacagagcagatttgaaacactctttttgtgcaattggcaagtggagatttcaagcgctttaaggtcaatggcagaaaaggaaatatcttcgtttcaaaactagacagaatgattctcagaaactcctttgtgatgtgtgcgttcaactcacagagttcaacctttcttttcatagagcagttgggaaacactctgtttgtaaagtctgtaagtggatattcagacttctttgaggccttcgttggaagcggggtttcttcatattctgctagacagaagaattctcagaaacttccttgtgttgtgtgttttcaactcacagagttgaacgatcctttacacagagcagacttgaaacactccttttgtggaatttgcaagtggagatttcagccgctttgaggtcaatggtagaataggaaatatcttcctatagaaagtagacagaatgattctcagaaactcctttgtgatgtgtgcgttcaactcacagagttcaacctttcttttcatagaacagttgggaaacactctgtttgtaaagtctgcaagtggatattcagacatccttgaggctttcgttggaaacgggatttcttcatattctgctagaaagaagaattctcagtaacttccttgtgttgtgtgtattcaactgacagagttgaactttcatttagagagagcagatttgaaacactgtttttgtggtatttgcaagtggagatttcaagcgctttggggccaaaggcagaaaaggaaatatcttcgtataaaactagacagaatcattctcagaaactgctctgcgatgtgtgcgttcagctctcagagtttaacttttcttttcattcagcagtttggaaacactctgtttgtaaagtctgcacgtggatattttgaccacttagaggccttcgatggaaatgggtttttgtcatgtaaggctagacagaagaattcccagtaacttccttgtgttgtgtacattcaactcacagagttgaacgttcccttagacagagcagatttgaaacactctttttgtgcaattggcaagtggagatttcaagcgcttaaggtcaatggcagaaaaggaaatatcttcgtttcaaaactagacagaatcattcccacaaactccgttgtgatgtgttcgttcaactcacagagtttaacctttcttttcatagagcagttaggaaacagtctgtttgtcaattctgtaagtggatattctgacatcttgtggccttcgttggaaacgggatttcttcacattctgctagacagaagaattctcagaaacttccttgtgttgtgtgttttcaagtcacagagttgaacgatcctttacacagagcagacttgaaacactctttttgtggaatttgccagtggagatttcagccgctttgaggtcaatggtagaaaaggaaatatcttcgtataaaaagtagacagaatgattctcagaaactcctttgtgatgtgggcgttcaactcacagagtttaacctttcttttcatagagcagttaggaaacactctgtttgtaaagtctccacgaggatacttggacttctttgaggccttcgttggaaacgggtttttttcatgtaaggctggacagaagaattctcagtaacttccttgtgttgtgtgtattcaactgacagagttgaactttcatttagagagagcagatttcaaacactgtttttttggaatttgcaagtggagatttcaagcgctttggggtcaaaggcagaaaaggaaatatcttcgtataaaaactagacagaatcattctcagaaaccgctctgtgatgtgtgcgttcaactctcagagtttaacttttcttttcattcagcagtttggaaacactctgtttgtaaagtctccacgtggatattttgaccacttagaagccttcgtttgaaacgggtttttttttcatgtaaggctagacagaagaattcccagtaacttccttgtgttgtgtacattcaactcacagagttgaacgttaccttagacagagcagatttgaaacactctttttgtgcaattggcaaatggagatttcaagcgctttaaggtcaatggcagaaaaggaaatatcttcgtttcaaaactagacagaatgattctcagaaactcctctgtgatgtgtgcgttcaactctcagagtttaacttttcttttcattcagcagtttggaaacactctgtttgtaaagtctgcacgtggatattttgaccacttagaggccttcgttggaaaagggatttcttcatatgatgctagacagaagaattctcagtaacttccttgtgttgtgtgtattcaactcacagagttgaacggatcctttacacagagcagacttgaaacactctttttgtggaatttgcaagtggagatttcagccgctttgaggtcaatggtagaataggaaatatcttcctatagaaactagacagaatgattctcagaaactcctttgtgatgtgtgtgttcaactcacagagtttaacctttcttttcatagagcagttaggaaacgctctgtttgtaaagtctgcaagtggatattcagacctcgttgagaccttcgttggaaacgggatttcttcatattctgctagacagaagaatcctcagtaacttccttgtgttgtgtttattcaactcacagagttgaatgatcctttacacagagcagacttgaaacactctttttgtggaatttgcaagtggagatttcagccgctttgtggtcaatggtagaaaaggaaatatcttcgtataaagactggacagaaatgattctcagaaacttctttgtgatgtgtgcgttcaactcacagagtttaacctttcttttcatagagcagttaggaaacactctgtttgtaaactctgcaagtcgatattcagacctctttgaggccttcgttggaaacgggatttcttcatactatgctagacagaagaattcccagtaacttccttgtgttgtgtgcattcaactcacagagttgaacgttcccttagacagagcagatttgaaacactctatttgtgcaatttgcaattgtagttttcaagctctttaaggtcaacggcagaaaaggaaatatcttcgtttcaaaactagacagaatgattctcataaactcctttgtgatgtgtgcgttcaactcacagagtttaacctttcttttcattgagcagttaggaaacactctgtttgtaaagtctgcaagtggatattcagacctccttgaggccttcattggaaacgggatttcttcatattctgctagacagaagaattctcagtaacttccttgtgttgtgtgtattcaactcacagagttgaacgatcctttacacagagcagacttgaaacactctttttgtggaatttgcaattggagatttcagccgctttgaggtcaatagtagaaaaggtaatatcttcgtagaaaaactagacagaatgattctcagaaactcctttgtgatgtgtgtgttcaactcacagagtttaacctttcttttcatagagcagttagtaaacactctgtttataaagtctgcaagtggatattcagacccctttgaggccttcgttggaaacgggatttcttcatattatgctagacagaagaattcccagtaacttccttgtgttgtgtgtgttcaactcacagagttgaactttcatttacacagagcagatttgaaacactctttttgtggaatttacaaatggaggtttcaagcgctttgaggccaaaggcagaaaaggaaatatcttcgtataaaaactagacagaatcattctcagaaactgctctgcgatgtgtgcgttcaactctcagagtttaacttttcttttcattcagcagtttggaaacactctgtttgtaaagtctgcacgtggataacttgaccacttagaggccttcgttggaaacgggtttttttcctgtaaggctagacagaagaattctcagtaacttccttgtcttgtgtgtattcaactcacagagttgaacgatcctttacacagagcagacttgtaacactctttttgtggaatttgcaagtggagatttcagccgctttgaagtcaaaggtagaaaaggaaatatcttcctataaaaactagacagaatcattctaagaaactgctctgtgatgtgtgtgttcaactctcagagtttaacttttcttttccttcagcagtttggaaacactctgtttgtaaagtctgcacgtggataatttgaccacttagaggccttcgttggaaacgggttttttcatgtaaggctagacagaagaattctcagtaacttccttgtgttgtgtgtattcaactcacagagttgaccgatcctttacacagagcagacttgtaacactctttttttgtggaatttgcaagtggagatttcagccgctttgaagtcaatggtaaaaaaggaaatatcttcgtttcaaaactagacagaatgattctcagaaactcctttgtgatgtgtgcgttcaactcaaagagtttaacctttcttttcatagagcagttaggaaacactctgtttgtaaagtctgcaagtggatattcagacctctttgaggccttctttggaaacgggtttttttcatataaggctagacagaagaattcccagtaacttccttgtgttgtgtgtgttcaactcacagagttgaactttcatttacacagagcagatttgaaacactctttttgtggaatttgcaagtggagatttcaagcgctttgaggccaaaggcagaaaaggaaatatcttcgtttcaaaactagacagaatcattctcagaaactgctgcgtgatgtgtgcgttcaactctcagagtttaacttttcttttcattcagcggtttggaaacactctgtttgtaaagtctgcacgtggacattttgaccacttagaggccttcgttggaaacgggtttttttcatgtgaggctagacagaagaattcccagtaacttccttgtgttgtgtgcattcaactcacagagttgaacgttcccttagacagagcagatttgaaacactctatttgtgcaatttgcaagtgtagatttcaagcgctttaaggtcaatggcagaaaaggaaatatcttcgtttcaaaactagacagaatgattctcagtaaactccttagtgatgtgtgcgttcaactcacagagtttaacctttctgttcatagagcagttaggaaacactctgtttgtaaagtatgcaagtggatatacagacctccttgaggccttcgttggaaacgggatttcttcatattctgctagacagaagaattctcagtaacttccttgtgttgtgtgtattcaactcacagagttgaacgatcctttacacagagcagacttgaaacactctttttgtggaatttgcaagtggagatttcagccgctttgaggtcaatagtagaaaaggaaatatcttcgtagaaaaactagacagaatgattctcagaaactcctttgtgatgtgtgcgttcaactcacagagtttaacctttcttttcatagagcagttaggaaacactctgtttgtaaagtctgcaagtggatattcagacctccttgaggccttggttggaaacgggatttcttcatattatgctagacagaagaattcccagtaacttccttgtgttgtgtgtgttcaacttacagagttgaactttcatttacacagagcagatttgaaacactctttttgtggaatttgcaagtggagatttcaagcgctttgaggccaaaggcagaaaaggaaatatcttcgtataaaaactagacagaatcattctcagaaactgctctgcgatgtgtgcgttcaactctcagtgtttaacttttcttttcattcagcagtttggaaacactctgtttgtaaagtctgcacgtggatattttgaccacttagaggccttcgttggaaacgggttcttttcctgtaaggctagacagaagaattcccagtaacttccttgtgttgtgtacattcaactcacagagttgaacgttcccttagacagagcagatttgaaacactctttttgtgcaattggcaagtggagatatcaagcgctttaaggtcaatggcagaaaaggaaatatcttcgtttcaaaactagacagaatcattcccacaaactgcgttgtgatgtgttcgttcatctcacagagtttaacctttcttttcatagagcagttaggaaacactctgtttgtaaattctgtaagtggatattctgacatcttgtggccttcgttggaaacgggatttcttcatattctgctagacagaagaattctcagtaacttccttctgttgtgtgtattcaactcacagagttgaacgatcctttacacagagcagacctgaaacactctttttgtggaatttgcaagtggagatttcagccgctttgaggtcaatagtagaaaaggaaatatcttcgtagaaaaactaggcagaatgattctcagatactcctttgtgatgtgtgcgttcaactcacagagtttaacctttcttttcatggagcagttaggaaacactctgtttgtaaagtctgcaaggggatattcagacctctttgaggctttcgttggaaacgggatttcttcatattctgctagacagannnnnnnnnnnnnnnnnnnnnnnnnnnnnnnnnnnnnnnnnnnnnnnnnnnnnnnnnnnnnnnnnnnnnnnnnnnnnnnnnnnnnnnnnnnnnnnnnnnnnnnnnnnnnnnnnnnnnnnnnnnnnnnnnnnnnnnnnnnnnnnnnnnnnnnnnnnnnnnnnnnnnnnnnnnnnnnnnnnnnnnnnnnnnnnnnnnnnnnnnnnnnnnnnnnnnnnnnnnnnnnnnnnnnnnnnnnnnnnnnnnnnnnnnnnnnnnnnnnnnnnnnnnnnnnnnnnnnnnnnnnnnnnnnnnnnnnnnnnnnnnnnnnnnnnnnnnnnnnnnnnnnnnnnnnnnnnnnnnnnnnnnnnnnnnnnnnnnnnnnnnnnnnnnnnnnnnnnnnnnnnnnnnnnnnnnnnnnnnnnnnnnnnnnnnnnnnnnnnnnnnnnnnnnnnnnnnnnnnnnnnnnnnnnnnnnnnnnnnnnnnnnnnnnnnnnnnnnnnnnnnnnnnnnnnnnnnnnnnnnnnnnnnnnnnnnnnnnnnnnnnnnnnnnnnnnnnnnnnnnnnnnnnnnnnnnnnnnnnnnnnnnnnnnnnnnnnnnnnnnnnnnnnnnnnnnnnnnnnnnnnnnnnnnnnnnnnnnnnnnnnnnnnnnnnnnnnnnnnnnnnnnnnnnnnnnnnnnnnnnnnnnnnnnnnnnnnnnnnnnnnnnnnnnnnnnnnnnnnnnnnnnnnnnnnnnnnnnnnnnnnnnnnnnnnnnnnnnnnnnnnnnnnnnnnnnnnnnnnnnnnnnnnnnnnnnnnnnnnnnnnnnnnnnnnnnnnnnnnnnnnnnnnnnnnnnnnnnnnnnnnnnnnnnnnnnnnnnnnnnnnnnnnnnnnnnnnnnnnnnnnnnnnnnnnnnnnnnnnnnnnnnnnnnnnnnnnnnnnnnnnnnnnnnnnnnnnnnnnnnnnnnnnnnnnnnnnnnnnnnnnnnnnnnnnnnnnnnnnnnnnnnnnnnnnnnnnnnnnnnnnnnnnnnnnnnnnnnnnnnnnnnnnnnnnnnnnnnnnnnnnnnnnnnnnnnnnnnnnnnnnnnnnnnnnnnnnnnnnnnnnnnnnnnnnnnnnnnnnnnnnnnnnnnnnnnnnnnnnnnnnnnnnnnnnnnnnnnnnnnnnnnnnnnnnnnnnnnnnnnnnnnnnnnnnnnnnnnnnnnnnnnnnnnnnnnnnnnnnnnnnnnnnnnnnnnnnnnnnnnnnnnnnnnnnnnnnnnnnnnnnnnnnnnnnnnnnnnnnnnnnnnnnnnnnnnnnnnnnnnnnnnnnnnnnnnnnnnnnnnnnnnnnnnnnnnnnnnnnnnnnnnnnnnnnnnnnnnnnnnnnnnnnnnnnnnnnnnnnnnnnnnnnnnnnnnnnnnnnnnnnnnnnnnnnnnnnnnnnnnnnnnnnnnnnnnnnnnnnnnnnnnnnnnnnnnnnnnnnnnnnnnnnnnnnnnnnnnnnnnnnnnnnnnnnnnnnnnnnnnnnnnnnnnnnnnnnnnnnnnnnnnnnnnnnnnnnnnnnnnnnnnnnnnnnnnnnnnnnnnnnnnnnnnnnnnnnnnnnnnnnnnnnnnnnnnnnnnnnnnnnnnnnnnnnnnnnnnnnnnnnnnnnnnnnnnnnnnnnnnnnnnnnnnnnnnnnnnnnnnnnnnnnnnnnnnnnnnnnnnnnnnnnnnnnnnnnnnnnnnnnnnnnnnnnnnnnnnnnnnnnnnnnnnnnnnnnnnnnnnnnnnnnnnnnnnnnnnnnnnnnnnnnnnnnnnnnnnnnnnnnnnnnnnnnnnnnnnnnnnnnnnnnnnnnnnnnnnnnnnnnnnnnnnnnnnnnnnnnnnnnnnnnnnnnnnnnnnnnnnnnnnnnnnnnnnnnnnnnnnnnnnnnnnnnnnnnnnnnnnnnnnnnnnnnnnnnnnnnnnnnnnnnnnnnnnnnnnnnnnnnnnnnnnnnnnnnnnnnnnnnnnnnnnnnnnnnnnnnnnnnnnnnnnnnnnnnnnnnnnnnnnnnnnnnnnnnnnnnnnnnnnnnnnnnnnnnnnnnnnnnnnnnnnnnnnnnnnnnnnnnnnnnnnnnnnnnnnnnnnnnnnnnnnnnnnnnnnnnnnnnnnnnnnnnnnnnnnnnnnnnnnnnnnnnnnnnnnnnnnnnnnnnnnnnnnnnnnnnnnnnnnnnnnnnnnnnnnnnnnnnnnnnnnnnnnnnnnnnnnnnnnnnnnnnnnnnnnnnnnnnnnnnnnnnnnnnnnnnnnnnnnnnnnnnnnnnnnnnnnnnnnnnnnnnnnnnnnnnnnnnnnnnnnnnnnnnnnnnnnnnnnnnnnnnnnnnnnnnnnnnnnnnnnnnnnnnnnnnnnnnnnnnnnnnnnnnnnnnnnnnnnnnnnnnnnnnnnnnnnnnnnnnnnnnnnnnnnnnnnnnnnnnnnnnnnnnnnnnnnnnnnnnnnnnnnnnnnnnnnnnnnnnnnnnnnnnnnnnnnnnnnnnnnnnnnnnnnnnnnnnnnnnnnnnnnnnnnnnnnnnnnnnnnnnnnnnnnnnnnnnnnnnnnnnnnnnnnnnnnnnnnnnnnnnnnnnnnnnnnnnnnnnnnnnnnnnnnnnnnnnnnnnnnnnnnnnnnnnnnnnnnnnnnnnnnnnnnnnnnnnnnnnnnnnnnnnnnnnnnnnnnnnnnnnnnnnnnnnnnnnnnnnnnnnnnnnnnnnnnnnnnnnnnnnnnnnnnnnnnnnnnnnnnnnnnnnnnnnnnnnnnnnnnnnnnnnnnnnnnnnnnnnnnnnnnnnnnnnnnnnnnnnnnnnnnnnnnnnnnnnnnnnnnnnnnnnnnnnnnnnnnnnnnnnnnnnnnnnnnnnnnnnnnnnnnnnnnnnnnnnnnnnnnnnnnnnnnnnnnnnnnnnnnnnnnnnnnnnnnnnnnnnnnnnnnnnnnnnnnnnnnnnnnnnnnnnnnnnnnnnnnnnnnnnnnnnnnnnnnnnnnnnnnnnnnnnnnnnnnnnnnnnnnnnnnnnnnnnnnnnnnnnnnnnnnnnnnnnnnnnnnnnnnnnnnnnnnnnnnnnnnnnnnnnnnnnnnnnnnnnnnnnnnnnnnnnnnnnnnnnnnnnnnnnnnnnnnnnnnnnnnnnnnnnnnnnnnnnnnnnnnnnnnnnnnnnnnnnnnnnnnnnnnnnnnnnnnnnnnnnnnnnnnnnnnnnnnnnnnnnnnnnnnnnnnnnnnnnnnnnnnnnnnnnnnnnnnnnnnnnnnnnnnnnnnnnnnnnnnnnnnnnnnnnnnnnnnnnnnnnnnnnnnnnnnnnnnnnnnnnnnnnnnnnnnnnnnnnnnnnnnnnnnnnnnnnnnnnnnnnnnnnnnnnnnnnnnnnnnnnnnnnnnnnnnnnnnnnnnnnnnnnnnnnnnnnnnnnnnnnnnnnnnnnnnnnnnnnnnnnnnnnnnnnnnnnnnnnnnnnnnnnnnnnnnnnnnnnnnnnnnnnnnnnnnnnnnnnnnnnnnnnnnnnnnnnnnnnnnnnnnnnnnnnnnnnnnnnnnnnnnnnnnnnnnnnnnnnnnnnnnnnnnnnnnnnnnnnnnnnnnnnnnnnnnnnnnnnnnnnnnnnnnnnnnnnnnnnnnnnnnnnnnnnnnnnnnnnnnnnnnnnnnnnnnnnnnnnnnnnnnnnnnnnnnnnnnnnnnnnnnnnnnnnnnnnnnnnnnnnnnnnnnnnnnnnnnnnnnnnnnnnnnnnnnnnnnnnnnnnnnnnnnnnnnnnnnnnnnnnnnnnnnnnnnnnnnnnnnnnnnnnnnnnnnnnnnnnnnnnnnnnnnnnnnnnnnnnnnnnnnnnnnnnnnnnnnnnnnnnnnnnnnnnnnnnnnnnnnnnnnnnnnnnnnnnnnnnnnnnnnnnnnnnnnnnnnnnnnnnnnnnnnnnnnnnnnnnnnnnnnnnnnnnnnnnnnnnnnnnnnnnnnnnnnnnnnnnnnnnnnnnnnnnnnnnnnnnnnnnnnnnnnnnnnnnnnnnnnnnnnnnnnnnnnnnnnnnnnnnnnnnnnnnnnnnnnnnnnnnnnnnnnnnnnnnnnnnnnnnnnnnnnnnnnnnnnnnnnnnnnnnnnnnnnnnnnnnnnnnnnnnnnnnnnnnnnnnnnnnnnnnnnnnnnnnnnnnnnnnnnnnnnnnnnnnnnnnnnnnnnnnnnnnnnnnnnnnnnnnnnnnnnnnnnnnnnnnnnnnnnnnnnnnnnnnnnnnnnnnnnnnnnnnnnnnnnnnnnnnnnnnnnnnnnnnnnnnnnnnnnnnnnnnnnnnnnnnnnnnnnnnnnnnnnnnnnnnnnnnnnnnnnnnnnnnnnnnnnnnnnnnnnnnnnnnnnnnnnnnnnnnnnnnnnnnnnnnnnnnnnnnnnnnnnnnnnnnnnnnnnnnnnnnnnnnnnnnnnnnnnnnnnnnnnnnnnnnnnnnnnnnnnnnnnnnnnnnnnnnnnnnnnnnnnnnnnnnnnnnnnnnnnnnnnnnnnnnnnnnnnnnnnnnnnnnnnnnnnnnnnnnnnnnnnnnnnnnnnnnnnnnnnnnnnnnnnnnnnnnnnnnnnnnnnnnnnnnnnnnnnnnnnnnnnnnnnnnnnnnnnnnnnnnnnnnnnnnnnnnnnnnnnnnnnnnnnnnnnnnnnnnnnnnnnnnnnnnnnnnnnnnnnnnnnnnnnnnnnnnnnnnnnnnnnnnnnnnnnnnnnnnnnnnnnnnnnnnnnnnnnnnnnnnnnnnnnnnnnnnnnnnnnnnnnnnnnnnnnnnnnnnnnnnnnnnnnnnnnnnnnnnnnnnnnnnnnnnnnnnnnnnnnnnnnnnnnnnnnnnnnnnnnnnnnnnnnnnnnnnnnnnnnnnnnnnnnnnnnnnnnnnnnnnnnnnnnnnnnnnnnnnnnnnnnnnnnnnnnnnnnnnnnnnnnnnnnnnnnnnnnnnnnnnnnnnnnnnnnnnnnnnnnnnnnnnnnnnnnnnnnnnnnnnnnnnnnnnnnnnnnnnnnnnnnnnnnnnnnnnnnnnnnnnnnnnnnnnnnnnnnnnnnnnnnnnnnnnnnnnnnnnnnnnnnnnnnnnnnnnnnnnnnnnnnnnnnnnnnnnnnnnnnnnnnnnnnnnnnnnnnnnnnnnnnnnnnnnnnnnnnnnnnnnnnnnnnnnnnnnnnnnnnnnnnnnnnnnnnnnnnnnnnnnnnnnnnnnnnnnnnnnnnnnnnnnnnnnnnnnnnnnnnnnnnnnnnnnnnnnnnnnnnnnnnnnnnnnnnnnnnnnnnnnnnnnnnnnnnnnnnnnnnnnnnnnnnnnnnnnnnnnnnnnnnnnnnnnnnnnnnnnnnnnnnnnnnnnnnnnnnnnnnnnnnnnnnnnnnnnnnnnnnnnnnnnnnnnnnnnnnnnnnnnnnnnnnnnnnnnnnnnnnnnnnnnnnnnnnnnnnnnnnnnnnnnnnnnnnnnnnnnnnnnnnnnnnnnnnnnnnnnnnnnnnnnnnnnnnnnnnnnnnnnnnnnnnnnnnnnnnnnnnnnnnnnnnnnnnnnnnnnnnnnnnnnnnnnnnnnnnnnnnnnnnnnnnnnnnnnnnnnnnnnnnnnnnnnnnnnnnnnnnnnnnnnnnnnnnnnnnnnnnnnnnnnnnnnnnnnnnnnnnnnnnnnnnnnnnnnnnnnnnnnnnnnnnnnnnnnnnnnnnnnnnnnnnnnnnnnnnnnnnnnnnnnnnnnnnnnnnnnnnnnnnnnnnnnnnnnnnnnnnnnnnnnnnnnnnnnnnnnnnnnnnnnnnnnnnnnnnnnnnnnnnnnnnnnnnnnnnnnnnnnnnnnnnnnnnnnnnnnnnnnnnnnnnnnnnnnnnnnnnnnnnnnnnnnnnnnnnnnnnnnnnnnnnnnnnnnnnnnnnnnnnnnnnnnnnnnnnnnnnnnnnnnnnnnnnnnnnnnnnnnnnnnnnnnnnnnnnnnnnnnnnnnnnnnnnnnnnnnnnnnnnnnnnnnnnnnnnnnnnnnnnnnnnnnnnnnnnnnnnnnnnnnnnnnnnnnnnnnnnnnnnnnnnnnnnnnnnnnnnnnnnnnnnnnnnnnnnnnnnnnnnnnnnnnnnnnnnnnnnnnnnnnnnnnnnnnnnnnnnnnnnnnnnnnnnnnnnnnnnnnnnnnnnnnnnnnnnnnnnnnnnnnnnnnnnnnnnnnnnnnnnnnnnnnnnnnnnnnnnnnnnnnnnnnnnnnnnnnnnnnnnnnnnnnnnnnnnnnnnnnnnnnnnnnnnnnnnnnnnnnnnnnnnnnnnnnnnnnnnnnnnnnnnnnnnnnnnnnnnnnnnnnnnnnnnnnnnnnnnnnnnnnnnnnnnnnnnnnnnnnnnnnnnnnnnnnnnnnnnnnnnnnnnnnnnnnnnnnnnnnnnnnnnnnnnnnnnnnnnnnnnnnnnnnnnnnnnnnnnnnnnnnnnnnnnnnnnnnnnnnnnnnnnnnnnnnnnnnnnnnnnnnnnnnnnnnnnnnnnnnnnnnnnnnnnnnnnnnnnnnnnnnnnnnnnnnnnnnnnnnnnnnnnnnnnnnnnnnnnnnnnnnnnnnnnnnnnnnnnnnnnnnnnnnnnnnnnnnnnnnnnnnnnnnnnnnnnnnnnnnnnnnnnnnnnnnnnnnnnnnnnnnnnnnnnnnnnnnnnnnnnnnnnnnnnnnnnnnnnnnnnnnnnnnnnnnnnnnnnnnnnnnnnnnnnnnnnnnnnnnnnnnnnnnnnnnnnnnnnnnnnnnnnnnnnnnnnnnnnnnnnnnnnnnnnnnnnnnnnnnnnnnnnnnnnnnnnnnnnnnnnnnnnnnnnnnnnnnnnnnnnnnnnnnnnnnnnnnnnnnnnnnnnnnnnnnnnnnnnnnnnnnnnnnnnnnnnnnnnnnnnnnnnnnnnnnnnnnnnnnnnnnnnnnnnnnnnnnnnnnnnnnnnnnnnnnnnnnnnnnnnnnnnnnnnnnnnnnnnnnnnnnnnnnnnnnnnnnnnnnnnnnnnnnnnnnnnnnnnnnnnnnnnnnnnnnnnnnnnnnnnnnnnnnnnnnnnnnnnnnnnnnnnnnnnnnnnnnnnnnnnnnnnnnnnnnnnnnnnnnnnnnnnnnnnnnnnnnnnnnnnnnnnnnnnnnnnnnnnnnnnnnnnnnnnnnnnnnnnnnnnnnnnnnnnnnnnnnnnnnnnnnnnnnnnnnnnnnnnnnnnnnnnnnnnnnnnnnnnnnnnnnnnnnnnnnnnnnnnnnnnnnnnnnnnnnnnnnnnnnnnnnnnnnnnnnnnnnnnnnnnnnnnnnnnnnnnnnnnnnnnnnnnnnnnnnnnnnnnnnnnnnnnnnnnnnnnnnnnnnnnnnnnnnnnnnnnnnnnnnnnnnnnnnnnnnnnnnnnnnnnnnnnnnnnnnnnnnnnnnnnnnnnnnnnnnnnnnnnnnnnnnnnnnnnnnnnnnnnnnnnnnnnnnnnnnnnnnnnnnnnnnnnnnnnnnnnnnnnnnnnnnnnnnnnnnnnnnnnnnnnnnnnnnnnnnnnnnnnnnnnnnnnnnnnnnnnnnnnnnnnnnnnnnnnnnnnnnnnnnnnnnnnnnnnnnnnnnnnnnnnnnnnnnnnnnnnnnnnnnnnnnnnnnnnnnnnnnnnnnnnnnnnnnnnnnnnnnnnnnnnnnnnnnnnnnnnnnnnnnnnnnnnnnnnnnnnnnnnnnnnnnnnnnnnnnnnnnnnnnnnnnnnnnnnnnnnnnnnnnnnnnnnnnnnnnnnnnnnnnnnnnnnnnnnnnnnnnnnnnnnnnnnnnnnnnnnnnnnnnnnnnnnnnnnnnnnnnnnnnnnnnnnnnnnnnnnnnnnnnnnnnnnnnnnnnnnnnnnnnnnnnnnnnnnnnnnnnnnnnnnnnnnnnnnnnnnnnnnnnnnnnnnnnnnnnnnnnnnnnnnnnnnnnnnnnnnnnnnnnnnnnnnnnnnnnnnnnnnnnnnnnnnnnnnnnnnnnnnnnnnnnnnnnnnnnnnnnnnnnnnnnnnnnnnnnnnnnnnnnnnnnnnnnnnnnnnnnnnnnnnnnnnnnnnnnnnnnnnnnnnnnnnnnnnnnnnnnnnnnnnnnnnnnnnnnnnnnnnnnnnnnnnnnnnnnnnnnnnnnnnnnnnnnnnnnnnnnnnnnnnnnnnnnnnnnnnnnnnnnnnnnnnnnnnnnnnnnnnnnnnnnnnnnnnnnnnnnnnnnnnnnnnnnnnnnnnnnnnnnnnnnnnnnnnnnnnnnnnnnnnnnnnnnnnnnnnnnnnnnnnnnnnnnnnnnnnnnnnnnnnnnnnnnnnnnnnnnnnnnnnnnnnnnnnnnnnnnnnnnnnnnnnnnnnnnnnnnnnnnnnnnnnnnnnnnnnnnnnnnnnnnnnnnnnnnnnnnnnnnnnnnnnnnnnnnnnnnnnnnnnnnnnnnnnnnnnnnnnnnnnnnnnnnnnnnnnnnnnnnnnnnnnnnnnnnnnnnnnnnnnnnnnnnnnnnnnnnnnnnnnnnnnnnnnnnnnnnnnnnnnnnnnnnnnnnnnnnnnnnnnnnnnnnnnnnnnnnnnnnnnnnnnnnnnnnnnnnnnnnnnnnnnnnnnnnnnnnnnnnnnnnnnnnnnnnnnnnnnnnnnnnnnnnnnnnnnnnnnnnnnnnnnnnnnnnnnnnnnnnnnnnnnnnnnnnnnnnnnnnnnnnnnnnnnnnnnnnnnnnnnnnnnnnnnnnnnnnnnnnnnnnnnnnnnnnnnnnnnnnnnnnnnnnnnnnnnnnnnnnnnnnnnnnnnnnnnnnnnnnnnnnnnnnnnnnnnnnnnnnnnnnnnnnnnnnnnnnnnnnnnnnnnnnnnnnnnnnnnnnnnnnnnnnnnnnnnnnnnnnnnnnnnnnnnnnnnnnnnnnnnnnnnnnnnnnnnnnnnnnnnnnnnnnnnnnnnnnnnnnnnnnnnnnnnnnnnnnnnnnnnnnnnnnnnnnnnnnnnnnnnnnnnnnnnnnnnnnnnnnnnnnnnnnnnnnnnnnnnnnnnnnnnnnnnnnnnnnnnnnnnnnnnnnnnnnnnnnnnnnnnnnnnnnnnnnnnnnnnnnnnnnnnnnnnnnnnnnnnnnnnnnnnnnnnnnnnnnnnnnnnnnnnnnnnnnnnnnnnnnnnnnnnnnnnnnnnnnnnnnnnnnnnnnnnnnnnnnnnnnnnnnnnnnnnnnnnnnnnnnnnnnnnnnnnnnnnnnnnnnnnnnnnnnnnnnnnnnnnnnnnnnnnnnnnnnnnnnnnnnnnnnnnnnnnnnnnnnnnnnnnnnnnnnnnnnnnnnnnnnnnnnnnnnnnnnnnnnnnnnnnnnnnnnnnnnnnnnnnnnnnnnnnnnnnnnnnnnnnnnnnnnnnnnnnnnnnnnnnnnnnnnnnnnnnnnnnnnnnnnnnnnnnnnnnnnnnnnnnnnnnnnnnnnnnnnnnnnnnnnnnnnnnnnnnnnnnnnnnnnnnnnnnnnnnnnnnnnnnnnnnnnnnnnnnnnnnnnnnnnnnnnnnnnnnnnnnnnnnnnnnnnnnnnnnnnnnnnnnnnnnnnnnnnnnnnnnnnnnnnnnnnnnnnnnnnnnnnnnnnnnnnnnnnnnnnnnnnnnnnnnnnnnnnnnnnnnnnnnnnnnnnnnnnnnnnnnnnnnnnnnnnnnnnnnnnnnnnnnnnnnnnnnnnnnnnnnnnnnnnnnnnnnnnnnnnnnnnnnnnnnnnnnnnnnnnnnnnnnnnnnnnnnnnnnnnnnnnnnnnnnnnnnnnnnnnnnnnnnnnnnnnnnnnnnnnnnnnnnnnnnnnnnnnnnnnnnnnnnnnnnnnnnnnnnnnnnnnnnnnnnnnnnnnnnnnnnnnnnnnnnnnnnnnnnnnnnnnnnnnnnnnnnnnnnnnnnnnnnnnnnnnnnnnnnnnnnnnnnnnnnnnnnnnnnnnnnnnnnnnnnnnnnnnnnnnnnnnnnnnnnnnnnnnnnnnnnnnnnnnnnnnnnnnnnnnnnnnnnnnnnnnnnnnnnnnnnnnnnnnnnnnnnnnnnnnnnnnnnnnnnnnnnnnnnnnnnnnnnnnnnnnnnnnnnnnnnnnnnnnnnnnnnnnnnnnnnnnnnnnnnnnnnnnnnnnnnnnnnnnnnnnnnnnnnnnnnnnnnnnnnnnnnnnnnnnnnnnnnnnnnnnnnnnnnnnnnnnnnnnnnnnnnnnnnnnnnnnnnnnnnnnnnnnnnnnnnnnnnnnnnnnnnnnnnnnnnnnnnnnnnnnnnnnnnnnnnnnnnnnnnnnnnnnnnnnnnnnnnnnnnnnnnnnnnnnnnnnnnnnnnnnnnnnnnnnnnnnnnnnnnnnnnnnnnnnnnnnnnnnnnnnnnnnnnnnnnnnnnnnnnnnnnnnnnnnnnnnnnnnnnnnnnnnnnnnnnnnnnnnnnnnnnnnnnnnnnnnnnnnnnnnnnnnnnnnnnnnnnnnnnnnnnnnnnnnnnnnnnnnnnnnnnnnnnnnnnnnnnnnnnnnnnnnnnnnnnnnnnnnnnnnnnnnnnnnnnnnnnnnnnnnnnnnnnnnnnnnnnnnnnnnnnnnnnnnnnnnnnnnnnnnnnnnnnnnnnnnnnnnnnnnnnnnnnnnnnnnnnnnnnnnnnnnnnnnnnnnnnnnnnnnnnnnnnnnnnnnnnnnnnnnnnnnnnnnnnnnnnnnnnnnnnnnnnnnnnnnnnnnnnnnnnnnnnnnnnnnnnnnnnnnnnnnnnnnnnnnnnnnnnnnnnnnnnnnnnnnnnnnnnnnnnnnnnnnnnnnnnnnnnnnnnnnnnnnnnnnnnnnnnnnnnnnnnnnnnnnnnnnnnnnnnnnnnnnnnnnnnnnnnnnnnnnnnnnnnnnnnnnnnnnnnnnnnnnnnnnnnnnnnnnnnnnnnnnnnnnnnnnnnnnnnnnnnnnnnnnnnnnnnnnnnnnnnnnnnnnnnnnnnnnnnnnnnnnnnnnnnnnnnnnnnnnnnnnnnnnnnnnnnnnnnnnnnnnnnnnnnnnnnnnnnnnnnnnnnnnnnnnnnnnnnnnnnnnnnnnnnnnnnnnnnnnnnnnnnnnnnnnnnnnnnnnnnnnnnnnnnnnnnnnnnnnnnnnnnnnnnnnnnnnnnnnnnnnnnnnnnnnnnnnnnnnnnnnnnnnnnnnnnnnnnnnnnnnnnnnnnnnnnnnnnnnnnnnnnnnnnnnnnnnnnnnnnnnnnnnnnnnnnnnnnnnnnnnnnnnnnnnnnnnnnnnnnnnnnnnnnnnnnnnnnnnnnnnnnnnnnnnnnnnnnnnnnnnnnnnnnnnnnnnnnnnnnnnnnnnnnnnnnnnnnnnnnnnnnnnnnnnnnnnnnnnnnnnnnnnnnnnnnnnnnnnnnnnnnnnnnnnnnnnnnnnnnnnnnnnnnnnnnnnnnnnnnnnnnnnnnnnnnnnnnnnnnnnnnnnnnnnnnnnnnnnnnnnnnnnnnnnnnnnnnnnnnnnnnnnnnnnnnnnnnnnnnnnnnnnnnnnnnnnnnnnnnnnnnnnnnnnnnnnnnnnnnnnnnnnnnnnnnnnnnnnnnnnnnnnnnnnnnnnnnnnnnnnnnnnnnnnnnnnnnnnnnnnnnnnnnnnnnnnnnnnnnnnnnnnnnnnnnnnnnnnnnnnnnnnnnnnnnnnnnnnnnnnnnnnnnnnnnnnnnnnnnnnnnnnnnnnnnnnnnnnnnnnnnnnnnnnnnnnnnnnnnnnnnnnnnnnnnnnnnnnnnnnnnnnnnnnnnnnnnnnnnnnnnnnnnnnnnnnnnnnnnnnnnnnnnnnnnnnnnnnnnnnnnnnnnnnnnnnnnnnnnnnnnnnnnnnnnnnnnnnnnnnnnnnnnnnnnnnnnnnnnnnnnnnnnnnnnnnnnnnnnnnnnnnnnnnnnnnnnnnnnnnnnnnnnnnnnnnnnnnnnnnnnnnnnnnnnnnnnnnnnnnnnnnnnnnnnnnnnnnnnnnnnnnnnnnnnnnnnnnnnnnnnnnnnnnnnnnnnnnnnnnnnnnnnnnnnnnnnnnnnnnnnnnnnnnnnnnnnnnnnnnnnnnnnnnnnnnnnnnnnnnnnnnnnnnnnnnnnnnnnnnnnnnnnnnnnnnnnnnnnnnnnnnnnnnnnnnnnnnnnnnnnnnnnnnnnnnnnnnnnnnnnnnnnnnnnnnnnnnnnnnnnnnnnnnnnnnnnnnnnnnnnnnnnnnnnnnnnnnnnnnnnnnnnnnnnnnnnnnnnnnnnnnnnnnnnnnnnnnnnnnnnnnnnnnnnnnnnnnnnnnnnnnnnnnnnnnnnnnnnnnnnnnnnnnnnnnnnnnnnnnnnnnnnnnnnnnnnnnnnnnnnnnnnnnnnnnnnnnnnnnnnnnnnnnnnnnnnnnnnnnnnnnnnnnnnnnnnnnnnnnnnnnnnnnnnnnnnnnnnnnnnnnnnnnnnnnnnnnnnnnnnnnnnnnnnnnnnnnnnnnnnnnnnnnnnnnnnnnnnnnnnnnnnnnnnnnnnnnnnnnnnnnnnnnnnnnnnnnnnnnnnnnnnnnnnnnnnnnnnnnnnnnnnnnnnnnnnnnnnnnnnnnnnnnnnnnnnnnnnnnnnnnnnnnnnnnnnnnnnnnnnnnnnnnnnnnnnnnnnnnnnnnnnnnnnnnnnnnnnnnnnnnnnnnnnnnnnnnnnnnnnnnnnnnnnnnnnnnnnnnnnnnnnnnnnnnnnnnnnnnnnnnnnnnnnnnnnnnnnnnnnnnnnnnnnnnnnnnnnnnnnnnnnnnnnnnnnnnnnnnnnnnnnnnnnnnnnnnnnnnnnnnnnnnnnnnnnnnnnnnnnnnnnnnnnnnnnnnnnnnnnnnnnnnnnnnnnnnnnnnnnnnnnnnnnnnnnnnnnnnnnnnnnnnnnnnnnnnnnnnnnnnnnnnnnnnnnnnnnnnnnnnnnnnnnnnnnnnnnnnnnnnnnnnnnnnnnnnnnnnnnnnnnnnnnnnnnnnnnnnnnnnnnnnnnnnnnnnnnnnnnnnnnnnnnnnnnnnnnnnnnnnnnnnnnnnnnnnnnnnnnnnnnnnnnnnnnnnnnnnnnnnnnnnnnnnnnnnnnnnnnnnnnnnnnnnnnnnnnnnnnnnnnnnnnnnnnnnnnnnnnnnnnnnnnnnnnnnnnnnnnnnnnnnnnnnnnnnnnnnnnnnnnnnnnnnnnnnnnnnnnnnnnnnnnnnnnnnnnnnnnnnnnnnnnnnnnnnnnnnnnnnnnnnnnnnnnnnnnnnnnnnnnnnnnnnnnnnnnnnnnnnnnnnnnnnnnnnnnnnnnnnnnnnnnnnnnnnnnnnnnnnnnnnnnnnnnnnnnnnnnnnnnnnnnnnnnnnnnnnnnnnnnnnnnnnnnnnnnnnnnnnnnnnnnnnnnnnnnnnnnnnnnnnnnnnnnnnnnnnnnnnnnnnnnnnnnnnnnnnnnnnnnnnnnnnnnnnnnnnnnnnnnnnnnnnnnnnnnnnnnnnnnnnnnnnnnnnnnnnnnnnnnnnnnnnnnnnnnnnnnnnnnnnnnnnnnnnnnnnnnnnnnnnnnnnnnnnnnnnnnnnnnnnnnnnnnnnnnnnnnnnnnnnnnnnnnnnnnnnnnnnnnnnnnnnnnnnnnnnnnnnnnnnnnnnnnnnnnnnnnnnnnnnnnnnnnnnnnnnnnnnnnnnnnnnnnnnnnnnnnnnnnnnnnnnnnnnnnnnnnnnnnnnnnnnnnnnnnnnnnnnnnnnnnnnnnnnnnnnnnnnnnnnnnnnnnnnnnnnnnnnnnnnnnnnnnnnnnnnnnnnnnnnnnnnnnnnnnnnnnnnnnnnnnnnnnnnnnnnnnnnnnnnnnnnnnnnnnnnnnnnnnnnnnnnnnnnnnnnnnnnnnnnnnnnnnnnnnnnnnnnnnnnnnnnnnnnnnnnnnnnnnnnnnnnnnnnnnnnnnnnnnnnnnnnnnnnnnnnnnnnnnnnnnnnnnnnnnnnnnnnnnnnnnnnnnnnnnnnnnnnnnnnnnnnnnnnnnnnnnnnnnnnnnnnnnnnnnnnnnnnnnnnnnnnnnnnnnnnnnnnnnnnnnnnnnnnnnnnnnnnnnnnnnnnnnnnnnnnnnnnnnnnnnnnnnnnnnnnnnnnnnnnnnnnnnnnnnnnnnnnnnnnnnnnnnnnnnnnnnnnnnnnnnnnnnnnnnnnnnnnnnnnnnnnnnnnnnnnnnnnnnnnnnnnnnnnnnnnnnnnnnnnnnnnnnnnnnnnnnnnnnnnnnnnnnnnnnnnnnnnnnnnnnnnnnnnnnnnnnnnnnnnnnnnnnnnnnnnnnnnnnnnnnnnnnnnnnnnnnnnnnnnnnnnnnnnnnnnnnnnnnnnnnnnnnnnnnnnnnnnnnnnnnnnnnnnnnnnnnnnnnnnnnnnnnnnnnnnnnnnnnnnnnnnnnnnnnnnnnnnnnnnnnnnnnnnnnnnnnnnnnnnnnnnnnnnnnnnnnnnnnnnnnnnnnnnnnnnnnnnnnnnnnnnnnnnnnnnnnnnnnnnnnnnnnnnnnnnnnnnnnnnnnnnnnnnnnnnnnnnnnnnnnnnnnnnnnnnnnnnnnnnnnnnnnnnnnnnnnnnnnnnnnnnnnnnnnnnnnnnnnnnnnnnnnnnnnnnnnnnnnnnnnnnnnnnnnnnnnnnnnnnnnnnnnnnnnnnnnnnnnnnnnnnnnnnnnnnnnnnnnnnnnnnnnnnnnnnnnnnnnnnnnnnnnnnnnnnnnnnnnnnnnnnnnnnnnnnnnnnnnnnnnnnnnnnnnnnnnnnnnnnnnnnnnnnnnnnnnnnnnnnnnnnnnnnnnnnnnnnnnnnnnnnnnnnnnnnnnnnnnnnnnnnnnnnnnnnnnnnnnnnnnnnnnnnnnnnnnnnnnnnnnnnnnnnnnnnnnnnnnnnnnnnnnnnnnnnnnnnnnnnnnnnnnnnnnnnnnnnnnnnnnnnnnnnnnnnnnnnnnnnnnnnnnnnnnnnnnnnnnnnnnnnnnnnnnnnnnnnnnnnnnnnnnnnnnnnnnnnnnnnnnnnnnnnnnnnnnnnnnnnnnnnnnnnnnnnnnnnnnnnnnnnnnnnnnnnnnnnnnnnnnnnnnnnnnnnnnnnnnnnnnnnnnnnnnnnnnnnnnnnnnnnnnnnnnnnnnnnnnnnnnnnnnnnnnnnnnnnnnnnnnnnnnnnnnnnnnnnnnnnnnnnnnnnnnnnnnnnnnnnnnnnnnnnnnnnnnnnnnnnnnnnnnnnnnnnnnnnnnnnnnnnnnnnnnnnnnnnnnnnnnnnnnnnnnnnnnnnnnnnnnnnnnnnnnnnnnnnnnnnnnnnnnnnnnnnnnnnnnnnnnnnnnnnnnnnnnnnnnnnnnnnnnnnnnnnnnnnnnnnnnnnnnnnnnnnnnnnnnnnnnnnnnnnnnnnnnnnnnnnnnnnnnnnnnnnnnnnnnnnnnnnnnnnnnnnnnnnnnnnnnnnnnnnnnnnnnnnnnnnnnnnnnnnnnnnnnnnnnnnnnnnnnnnnnnnnnnnnnnnnnnnnnnnnnnnnnnnnnnnnnnnnnnnnnnnnnnnnnnnnnnnnnnnnnnnnnnnnnnnnnnnnnnnnnnnnnnnnnnnnnnnnnnnnnnnnnnnnnnnnnnnnnnnnnnnnnnnnnnnnnnnnnnnnnnnnnnnnnnnnnnnnnnnnnnnnnnnnnnnnnnnnnnnnnnnnnnnnnnnnnnnnnnnnnnnnnnnnnnnnnnnnnnnnnnnnnnnnnnnnnnnnnnnnnnnnnnnnnnnnnnnnnnnnnnnnnnnnnnnnnnnnnnnnnnnnnnnnnnnnnnnnnnnnnnnnnnnnnnnnnnnnnnnnnnnnnnnnnnnnnnnnnnnnnnnnnnnnnnnnnnnnnnnnnnnnnnnnnnnnnnnnnnnnnnnnnnnnnnnnnnnnnnnnnnnnnnnnnnnnnnnnnnnnnnnnnnnnnnnnnnnnnnnnnnnnnnnnnnnnnnnnnnnnnnnnnnnnnnnnnnnnnnnnnnnnnnnnnnnnnnnnnnnnnnnnnnnnnnnnnnnnnnnnnnnnnnnnnnnnnnnnnnnnnnnnnnnnnnnnnnnnnnnnnnnnnnnnnnnnnnnnnnnnnnnnnnnnnnnnnnnnnnnnnnnnnnnnnnnnnnnnnnnnnnnnnnnnnnnnnnnnnnnnnnnnnnnnnnnnnnnnnnnnnnnnnnnnnnnnnnnnnnnnnnnnnnnnnnnnnnnnnnnnnnnnnnnnnnnnnnnnnnnnnnnnnnnnnnnnnnnnnnnnnnnnnnnnnnnnnnnnnnnnnnnnnnnnnnnnnnnnnnnnnnnnnnnnnnnnnnnnnnnnnnnnnnnnnnnnnnnnnnnnnnnnnnnnnnnnnnnnnnnnnnnnnnnnnnnnnnnnnnnnnnnnnnnnnnnnnnnnnnnnnnnnnnnnnnnnnnnnnnnnnnnnnnnnnnnnnnnnnnnnnnnnnnnnnnnnnnnnnnnnnnnnnnnnnnnnnnnnnnnnnnnnnnnnnnnnnnnnnnnnnnnnnnnnnnnnnnnnnnnnnnnnnnnnnnnnnnnnnnnnnnnnnnnnnnnnnnnnnnnnnnnnnnnnnnnnnnnnnnnnnnnnnnnnnnnnnnnnnnnnnnnnnnnnnnnnnnnnnnnnnnnnnnnnnnnnnnnnnnnnnnnnnnnnnnnnnnnnnnnnnnnnnnnnnnnnnnnnnnnnnnnnnnnnnnnnnnnnnnnnnnnnnnnnnnnnnnnnnnnnnnnnnnnnnnnnnnnnnnnnnnnnnnnnnnnnnnnnnnnnnnnnnnnnnnnnnnnnnnnnnnnnnnnnnnnnnnnnnnnnnnnnnnnnnnnnnnnnnnnnnnnnnnnnnnnnnnnnnnnnnnnnnnnnnnnnnnnnnnnnnnnnnnnnnnnnnnnnnnnnnnnnnnnnnnnnnnnnnnnnnnnnnnnnnnnnnnnnnnnnnnnnnnnnnnnnnnnnnnnnnnnnnnnnnnnnnnnnnnnnnnnnnnnnnnnnnnnnnnnnnnnnnnnnnnnnnnnnnnnnnnnnnnnnnnnnnnnnnnnnnnnnnnnnnnnnnnnnnnnnnnnnnnnnnnnnnnnnnnnnnnnnnnnnnnnnnnnnnnnnnnnnnnnnnnnnnnnnnnnnnnnnnnnnnnnnnnnnnnnnnnnnnnnnnnnnnnnnnnnnnnnnnnnnnnnnnnnnnnnnnnnnnnnnnnnnnnnnnnnnnnnnnnnnnnnnnnnnnnnnnnnnnnnnnnnnnnnnnnnnnnnnnnnnnnnnnnnnnnnnnnnnnnnnnnnnnnnnnnnnnnnnnnnnnnnnnnnnnnnnnnnnnnnnnnnnnnnnnnnnnnnnnnnnnnnnnnnnnnnnnnnnnnnnnnnnnnnnnnnnnnnnnnnnnnnnnnnnnnnnnnnnnnnnnnnnnnnnnnnnnnnnnnnnnnnnnnnnnnnnnnnnnnnnnnnnnnnnnnnnnnnnnnnnnnnnnnnnnnnnnnnnnnnnnnnnnnnnnnnnnnnnnnnnnnnnnnnnnnnnnnnnnnnnnnnnnnnnnnnnnnnnnnnnnnnnnnnnnnnnnnnnnnnnnnnnnnnnnnnnnnnnnnnnnnnnnnnnnnnnnnnnnnnnnnnnnnnnnnnnnnnnnnnnnnnnnnnnnnnnnnnnnnnnnnnnnnnnnnnnnnnnnnnnnnnnnnnnnnnnnnnnnnnnnnnnnnnnnnnnnnnnnnnnnnnnnnnnnnnnnnnnnnnnnnnnnnnnnnnnnnnnnnnnnnnnnnnnnnnnnnnnnnnnnnnnnnnnnnnnnnnnnnnnnnnnnnnnnnnnnnnnnnnnnnnnnnnnnnnnnnnnnnnnnnnnnnnnnnnnnnnnnnnnnnnnnnnnnnnnnnnnnnnnnnnnnnnnnnnnnnnnnnnnnnnnnnnnnnnnnnnnnnnnnnnnnnnnnnnnnnnnnnnnnnnnnnnnnnnnnnnnnnnnnnnnnnnnnnnnnnnnnnnnnnnnnnnnnnnnnnnnnnnnnnnnnnnnnnnnnnnnnnnnnnnnnnnnnnnnnnnnnnnnnnnnnnnnnnnnnnnnnnnnnnnnnnnnnnnnnnnnnnnnnnnnnnnnnnnnnnnnnnnnnnnnnnnnnnnnnnnnnnnnnnnnnnnnnnnnnnnnnnnnnnnnnnnnnnnnnnnnnnnnnnnnnnnnnnnnnnnnnnnnnnnnnnnnnnnnnnnnnnnnnnnnnnnnnnnnnnnnnnnnnnnnnnnnnnnnnnnnnnnnnnnnnnnnnnnnnnnnnnnnnnnnnnnnnnnnnnnnnnnnnnnnnnnnnnnnnnnnnnnnnnnnnnnnnnnnnnnnnnnnnnnnnnnnnnnnnnnnnnnnnnnnnnnnnnnnnnnnnnnnnnnnnnnnnnnnnnnnnnnnnnnnnnnnnnnnnnnnnnnnnnnnnnnnnnnnnnnnnnnnnnnnnnnnnnnnnnnnnnnnnnnnnnnnnnnnnnnnnnnnnnnnnnnnnnnnnnnnnnnnnnnnnnnnnnnnnnnnnnnnnnnnnnnnnnnnnnnnnnnnnnnnnnnnnnnnnnnnnnnnnnnnnnnnnnnnnnnnnnnnnnnnnnnnnnnnnnnnnnnnnnnnnnnnnnnnnnnnnnnnnnnnnnnnnnnnnnnnnnnnnnnnnnnnnnnnnnnnnnnnnnnnnnnnnnnnnnnnnnnnnnnnnnnnnnnnnnnnnnnnnnnnnnnnnnnnnnnnnnnnnnnnnnnnnnnnnnnnnnnnnnnnnnnnnnnnnnnnnnnnnnnnnnnnnnnnnnnnnnnnnnnnnnnnnnnnnnnnnnnnnnnnnnnnnnnnnnnnnnnnnnnnnnnnnnnnnnnnnnnnnnnnnnnnnnnnnnnnnnnnnnnnnnnnnnnnnnnnnnnnnnnnnnnnnnnnnnnnnnnnnnnnnnnnnnnnnnnnnnnnnnnnnnnnnnnnnnnnnnnnnnnnnnnnnnnnnnnnnnnnnnnnnnnnnnnnnnnnnnnnnnnnnnnnnnnnnnnnnnnnnnnnnnnnnnnnnnnnnnnnnnnnnnnnnnnnnnnnnnnnnnnnnnnnnnnnnnnnnnnnnnnnnnnnnnnnnnnnnnnnnnnnnnnnnnnnnnnnnnnnnnnnnnnnnnnnnnnnnnnnnnnnnnnnnnnnnnnnnnnnnnnnnnnnnnnnnnnnnnnnnnnnnnnnnnnnnnnnnnnnnnnnnnnnnnnnnnnnnnnnnnnnnnnnnnnnnnnnnnnnnnnnnnnnnnnnnnnnnnnnnnnnnnnnnnnnnnnnnnnnnnnnnnnnnnnnnnnnnnnnnnnnnnnnnnnnnnnnnnnnnnnnnnnnnnnnnnnnnnnnnnnnnnnnnnnnnnnnnnnnnnnnnnnnnnnnnnnnnnnnnnnnnnnnnnnnnnnnnnnnnnnnnnnnnnnnnnnnnnnnnnnnnnnnnnnnnnnnnnnnnnnnnnnnnnnnnnnnnnnnnnnnnnnnnnnnnnnnnnnnnnnnnnnnnnnnnnnnnnnnnnnnnnnnnnnnnnnnnnnnnnnnnnnnnnnnnnnnnnnnnnnnnnnnnnnnnnnnnnnnnnnnnnnnnnnnnnnnnnnnnnnnnnnnnnnnnnnnnnnnnnnnnnnnnnnnnnnnnnnnnnnnnnnnnnnnnnnnnnnnnnnnnnnnnnnnnnnnnnnnnnnnnnnnnnnnnnnnnnnnnnnnnnnnnnnnnnnnnnnnnnnnnnnnnnnnnnnnnnnnnnnnnnnnnnnnnnnnnnnnnnnnnnnnnnnnnnnnnnnnnnnnnnnnnnnnnnnnnnnnnnnnnnnnnnnnnnnnnnnnnnnnnnnnnnnnnnnnnnnnnnnnnnnnnnnnnnnnnnnnnnnnnnnnnnnnnnnnnnnnnnnnnnnnnnnnnnnnnnnnnnnnnnnnnnnnnnnnnnnnnnnnnnnnnnnnnnnnnnnnnnnnnnnnnnnnnnnnnnnnnnnnnnnnnnnnnnnnnnnnnnnnnnnnnnnnnnnnnnnnnnnnnnnnnnnnnnnnnnnnnnnnnnnnnnnnnnnnnnnnnnnnnnnnnnnnnnnnnnnnnnnnnnnnnnnnnnnnnnnnnnnnnnnnnnnnnnnnnnnnnnnnnnnnnnnnnnnnnnnnnnnnnnnnnnnnnnnnnnnnnnnnnnnnnnnnnnnnnnnnnnnnnnnnnnnnnnnnnnnnnnnnnnnnnnnnnnnnnnnnnnnnnnnnnnnnnnnnnnnnnnnnnnnnnnnnnnnnnnnnnnnnnnnnnnnnnnnnnnnnnnnnnnnnnnnnnnnnnnnnnnnnnnnnnnnnnnnnnnnnnnnnnnnnnnnnnnnnnnnnnnnnnnnnnnnnnnnnnnnnnnnnnnnnnnnnnnnnnnnnnnnnnnnnnnnnnnnnnnnnnnnnnnnnnnnnnnnnnnnnnnnnnnnnnnnnnnnnnnnnnnnnnnnnnnnnnnnnnnnnnnnnnnnnnnnnnnnnnnnnnnnnnnnnnnnnnnnnnnnnnnnnnnnnnnnnnnnnnnnnnnnnnnnnnnnnnnnnnnnnnnnnnnnnnnnnnnnnnnnnnnnnnnnnnnnnnnnnnnnnnnnnnnnnnnnnnnnnnnnnnnnnnnnnnnnnnnnnnnnnnnnnnnnnnnnnnnnnnnnnnnnnnnnnnnnnnnnnnnnnnnnnnnnnnnnnnnnnnnnnnnnnnnnnnnnnnnnnnnnnnnnnnnnnnnnnnnnnnnnnnnnnnnnnnnnnnnnnnnnnnnnnnnnnnnnnnnnnnnnnnnnnnnnnnnnnnnnnnnnnnnnnnnnnnnnnnnnnnnnnnnnnnnnnnnnnnnnnnnnnnnnnnnnnnnnnnnnnnnnnnnnnnnnnnnnnnnnnnnnnnnnnnnnnnnnnnnnnnnnnnnnnnnnnnnnnnnnnnnnnnnnnnnnnnnnnnnnnnnnnnnnnnnnnnnnnnnnnnnnnnnnnnnnnnnnnnnnnnnnnnnnnnnnnnnnnnnnnnnnnnnnnnnnnnnnnnnnnnnnnnnnnnnnnnnnnnnnnnnnnnnnnnnnnnnnnnnnnnnnnnnnnnnnnnnnnnnnnnnnnnnnnnnnnnnnnnnnnnnnnnnnnnnnnnnnnnnnnnnnnnnnnnnnnnnnnnnnnnnnnnnnnnnnnnnnnnnnnnnnnnnnnnnnnnnnnnnnnnnnnnnnnnnnnnnnnnnnnnnnnnnnnnnnnnnnnnnnnnnnnnnnnnnnnnnnnnnnnnnnnnnnnnnnnnnnnnnnnnnnnnnnnnnnnnnnnnnnnnnnnnnnnnnnnnnnnnnnnnnnnnnnnnnnnnnnnnnnnnnnnnnnnnnnnnnnnnnnnnnnnnnnnnnnnnnnnnnnnnnnnnnnnnnnnnnnnnnnnnnnnnnnnnnnnnnnnnnnnnnnnnnnnnnnnnnnnnnnnnnnnnnnnnnnnnnnnnnnnnnnnnnnnnnnnnnnnnnnnnnnnnnnnnnnnnnnnnnnnnnnnnnnnnnnnnnnnnnnnnnnnnnnnnnnnnnnnnnnnnnnnnnnnnnnnnnnnnnnnnnnnnnnnnnnnnnnnnnnnnnnnnnnnnnnnnnnnnnnnnnnnnnnnnnnnnnnnnnnnnnnnnnnnnnnnnnnnnnnnnnnnnnnnnnnnnnnnnnnnnnnnnnnnnnnnnnnnnnnnnnnnnnnnnnnnnnnnnnnnnnnnnnnnnnnnnnnnnnnnnnnnnnnnnnnnnnnnnnnnnnnnnnnnnnnnnnnnnnnnnnnnnnnnnnnnnnnnnnnnnnnnnnnnnnnnnnnnnnnnnnnnnnnnnnnnnnnnnnnnnnnnnnnnnnnnnnnnnnnnnnnnnnnnnnnnnnnnnnnnnnnnnnnnnnnnnnnnnnnnnnnnnnnnnnnnnnnnnnnnnnnnnnnnnnnnnnnnnnnnnnnnnnnnnnnnnnnnnnnnnnnnnnnnnnnnnnnnnnnnnnnnnnnnnnnnnnnnnnnnnnnnnnnnnnnnnnnnnnnnnnnnnnnnnnnnnnnnnnnnnnnnnnnnnnnnnnnnnnnnnnnnnnnnnnnnnnnnnnnnnnnnnnnnnnnnnnnnnnnnnnnnnnnnnnnnnnnnnnnnnnnnnnnnnnnnnnnnnnnnnnnnnnnnnnnnnnnnnnnnnnnnnnnnnnnnnnnnnnnnnnnnnnnnnnnnnnnnnnnnnnnnnnnnnnnnnnnnnnnnnnnnnnnnnnnnnnnnnnnnnnnnnnnnnnnnnnnnnnnnnnnnnnnnnnnnnnnnnnnnnnnnnnnnnnnnnnnnnnnnnnnnnnnnnnnnnnnnnnnnnnnnnnnnnnnnnnnnnnnnnnnnnnnnnnnnnnnnnnnnnnnnnnnnnnnnnnnnnnnnnnnnnnnnnnnnnnnnnnnnnnnnnnnnnnnnnnnnnnnnnnnnnnnnnnnnnnnnnnnnnnnnnnnnnnnnnnnnnnnnnnnnnnnnnnnnnnnnnnnnnnnnnnnnnnnnnnnnnnnnnnnnnnnnnnnnnnnnnnnnnnnnnnnnnnnnnnnnnnnnnnnnnnnnnnnnnnnnnnnnnnnnnnnnnnnnnnnnnnnnnnnnnnnnnnnnnnnnnnnnnnnnnnnnnnnnnnnnnnnnnnnnnnnnnnnnnnnnnnnnnnnnnnnnnnnnnnnnnnnnnnnnnnnnnnnnnnnnnnnnnnnnnnnnnnnnnnnnnnnnnnnnnnnnnnnnnnnnnnnnnnnnnnnnnnnnnnnnnnnnnnnnnnnnnnnnnnnnnnnnnnnnnnnnnnnnnnnnnnnnnnnnnnnnnnnnnnnnnnnnnnnnnnnnnnnnnnnnnnnnnnnnnnnnnnnnnnnnnnnnnnnnnnnnnnnnnnnnnnnnnnnnnnnnnnnnnnnnnnnnnnnnnnnnnnnnnnnnnnnnnnnnnnnnnnnnnnnnnnnnnnnnnnnnnnnnnnnnnnnnnnnnnnnnnnnnnnnnnnnnnnnnnnnnnnnnnnnnnnnnnnnnnnnnnnnnnnnnnnnnnnnnnnnnnnnnnnnnnnnnnnnnnnnnnnnnnnnnnnnnnnnnnnnnnnnnnnnnnnnnnnnnnnnnnnnnnnnnnnnnnnnnnnnnnnnnnnnnnnnnnnnnnnnnnnnnnnnnnnnnnnnnnnnnnnnnnnnnnnnnnnnnnnnnnnnnnnnnnnnnnnnnnnnnnnnnnnnnnnnnnnnnnnnnnnnnnnnnnnnnnnnnnnnnnnnnnnnnnnnnnnnnnnnnnnnnnnnnnnnnnnnnnnnnnnnnnnnnnnnnnnnnnnnnnnnnnnnnnnnnnnnnnnnnnnnnnnnnnnnnnnnnnnnnnnnnnnnnnnnnnnnnnnnnnnnnnnnnnnnnnnnnnnnnnnnnnnnnnnnnnnnnnnnnnnnnnnnnnnnnnnnnnnnnnnnnnnnnnnnnnnnnnnnnnnnnnnnnnnnnnnnnnnnnnnnnnnnnnnnnnnnnnnnnnnnnnnnnnnnnnnnnnnnnnnnnnnnnnnnnnnnnnnnnnnnnnnnnnnnnnnnnnnnnnnnnnnnnnnnnnnnnnnnnnnnnnnnnnnnnnnnnnnnnnnnnnnnnnnnnnnnnnnnnnnnnnnnnnnnnnnnnnnnnnnnnnnnnnnnnnnnnnnnnnnnnnnnnnnnnnnnnnnnnnnnnnnnnnnnnnnnnnnnnnnnnnnnnnnnnnnnnnnnnnnnnnnnnnnnnnnnnnnnnnnnnnnnnnnnnnnnnnnnnnnnnnnnnnnnnnnnnnnnnnnnnnnnnnnnnnnnnnnnnnnnnnnnnnnnnnnnnnnnnnnnnnnnnnnnnnnnnnnnnnnnnnnnnnnnnnnnnnnnnnnnnnnnnnnnnnnnnnnnnnnnnnnnnnnnnnnnnnnnnnnnnnnnnnnnnnnnnnnnnnnnnnnnnnnnnnnnnnnnnnnnnnnnnnnnnnnnnnnnnnnnnnnnnnnnnnnnnnnnnnnnnnnnnnnnnnnnnnnnnnnnnnnnnnnnnnnnnnnnnnnnnnnnnnnnnnnnnnnnnnnnnnnnnnnnnnnnnnnnnnnnnnnnnnnnnnnnnnnnnnnnnnnnnnnnnnnnnnnnnnnnnnnnnnnnnnnnnnnnnnnnnnnnnnnnnnnnnnnnnnnnnnnnnnnnnnnnnnnnnnnnnnnnnnnnnnnnnnnnnnnnnnnnnnnnnnnnnnnnnnnnnnnnnnnnnnnnnnnnnnnnnnnnnnnnnnnnnnnnnnnnnnnnnnnnnnnnnnnnnnnnnnnnnnnnnnnnnnnnnnnnnnnnnnnnnnnnnnnnnnnnnnnnnnnnnnnnnnnnnnnnnnnnnnnnnnnnnnnnnnnnnnnnnnnnnnnnnnnnnnnnnnnnnnnnnnnnnnnnnnnnnnnnnnnnnnnnnnnnnnnnnnnnnnnnnnnnnnnnnnnnnnnnnnnnnnnnnnnnnnnnnnnnnnnnnnnnnnnnnnnnnnnnnnnnnnnnnnnnnnnnnnnnnnnnnnnnnnnnnnnnnnnnnnnnnnnnnnnnnnnnnnnnnnnnnnnnnnnnnnnnnnnnnnnnnnnnnnnnnnnnnnnnnnnnnnnnnnnnnnnnnnnnnnnnnnnnnnnnnnnnnnnnnnnnnnnnnnnnnnnnnnnnnnnnnnnnnnnnnnnnnnnnnnnnnnnnnnnnnnnnnnnnnnnnnnnnnnnnnnnnnnnnnnnnnnnnnnnnnnnnnnnnnnnnnnnnnnnnnnnnnnnnnnnnnnnnnnnnnnnnnnnnnnnnnnnnnnnnnnnnnnnnnnnnnnnnnnnnnnnnnnnnnnnnnnnnnnnnnnnnnnnnnnnnnnnnnnnnnnnnnnnnnnnnnnnnnnnnnnnnnnnnnnnnnnnnnnnnnnnnnnnnnnnnnnnnnnnnnnnnnnnnnnnnnnnnnnnnnnnnnnnnnnnnnnnnnnnnnnnnnnnnnnnnnnnnnnnnnnnnnnnnnnnnnnnnnnnnnnnnnnnnnnnnnnnnnnnnnnnnnnnnnnnnnnnnnnnnnnnnnnnnnnnnnnnnnnnnnnnnnnnnnnnnnnnnnnnnnnnnnnnnnnnnnnnnnnnnnnnnnnnnnnnnnnnnnnnnnnnnnnnnnnnnnnnnnnnnnnnnnnnnnnnnnnnnnnnnnnnnnnnnnnnnnnnnnnnnnnnnnnnnnnnnnnnnnnnnnnnnnnnnnnnnnnnnnnnnnnnnnnnnnnnnnnnnnnnnnnnnnnnnnnnnnnnnnnnnnnnnnnnnnnnnnnnnnnnnnnnnnnnnnnnnnnnnnnnnnnnnnnnnnnnnnnnnnnnnnnnnnnnnnnnnnnnnnnnnnnnnnnnnnnnnnnnnnnnnnnnnnnnnnnnnnnnnnnnnnnnnnnnnnnnnnnnnnnnnnnnnnnnnnnnnnnnnnnnnnnnnnnnnnnnnnnnnnnnnnnnnnnnnnnnnnnnnnnnnnnnnnnnnnnnnnnnnnnnnnnnnnnnnnnnnnnnnnnnnnnnnnnnnnnnnnnnnnnnnnnnnnnnnnnnnnnnnnnnnnnnnnnnnnnnnnnnnnnnnnnnnnnnnnnnnnnnnnnnnnnnnnnnnnnnnnnnnnnnnnnnnnnnnnnnnnnnnnnnnnnnnnnnnnnnnnnnnnnnnnnnnnnnnnnnnnnnnnnnnnnnnnnnnnnnnnnnnnnnnnnnnnnnnnnnnnnnnnnnnnnnnnnnnnnnnnnnnnnnnnnnnnnnnnnnnnnnnnnnnnnnnnnnnnnnnnnnnnnnnnnnnnnnnnnnnnnnnnnnnnnnnnnnnnnnnnnnnnnnnnnnnnnnnnnnnnnnnnnnnnnnnnnnnnnnnnnnnnnnnnnnnnnnnnnnnnnnnnnnnnnnnnnnnnnnnnnnnnnnnnnnnnnnnnnnnnnnnnnnnnnnnnnnnnnnnnnnnnnnnnnnnnnnnnnnnnnnnnnnnnnnnnnnnnnnnnnnnnnnnnnnnnnnnnnnnnnnnnnnnnnnnnnnnnnnnnnnnnnnnnnnnnnnnnnnnnnnnnnnnnnnnnnnnnnnnnnnnnnnnnnnnnnnnnnnnnnnnnnnnnnnnnnnnnnnnnnnnnnnnnnnnnnnnnnnnnnnnnnnnnnnnnnnnnnnnnnnnnnnnnnnnnnnnnnnnnnnnnnnnnnnnnnnnnnnnnnnnnnnnnnnnnnnnnnnnnnnnnnnnnnnnnnnnnnnnnnnnnnnnnnnnnnnnnnnnnnnnnnnnnnnnnnnnnnnnnnnnnnnnnnnnnnnnnnnnnnnnnnnnnnnnnnnnnnnnnnnnnnnnnnnnnnnnnnnnnnnnnnnnnnnnnnnnnnnnnnnnnnnnnnnnnnnnnnnnnnnnnnnnnnnnnnnnnnnnnnnnnnnnnnnnnnnnnnnnnnnnnnnnnnnnnnnnnnnnnnnnnnnnnnnnnnnnnnnnnnnnnnnnnnnnnnnnnnnnnnnnnnnnnnnnnnnnnnnnnnnnnnnnnnnnnnnnnnnnnnnnnnnnnnnnnnnnnnnnnnnnnnnnnnnnnnnnnnnnnnnnnnnnnnnnnnnnnnnnnnnnnnnnnnnnnnnnnnnnnnnnnnnnnnnnnnnnnnnnnnnnnnnnnnnnnnnnnnnnnnnnnnnnnnnnnnnnnnnnnnnnnnnnnnnnnnnnnnnnnnnnnnnnnnnnnnnnnnnnnnnnnnnnnnnnnnnnnnnnnnnnnnnnnnnnnnnnnnnnnnnnnnnnnnnnnnnnnnnnnnnnnnnnnnnnnnnnnnnnnnnnnnnnnnnnnnnnnnnnnnnnnnnnnnnnnnnnnnnnnnnnnnnnnnnnnnnnnnnnnnnnnnnnnnnnnnnnnnnnnnnnnnnnnnnnnnnnnnnnnnnnnnnnnnnnnnnnnnnnnnnnnnnnnnnnnnnnnnnnnnnnnnnnnnnnnnnnnnnnnnnnnnnnnnnnnnnnnnnnnnnnnnnnnnnnnnnnnnnnnnnnnnnnnnnnnnnnnnnnnnnnnnnnnnnnnnnnnnnnnnnnnnnnnnnnnnnnnnnnnnnnnnnnnnnnnnnnnnnnnnnnnnnnnnnnnnnnnnnnnnnnnnnnnnnnnnnnnnnnnnnnnnnnnnnnnnnnnnnnnnnnnnnnnnnnnnnnnnnnnnnnnnnnnnnnnnnnnnnnnnnnnnnnnnnnnnnnnnnnnnnnnnnnnnnnnnnnnnnnnnnnnnnnnnnnnnnnnnnnnnnnnnnnnnnnnnnnnnnnnnnnnnnnnnnnnnnnnnnnnnnnnnnnnnnnnnnnnnnnnnnnnnnnnnnnnnnnnnnnnnnnnnnnnnnnnnnnnnnnnnnnnnnnnnnnnnnnnnnnnnnnnnnnnnnnnnnnnnnnnnnnnnnnnnnnnnnnnnnnnnnnnnnnnnnnnnnnnnnnnnnnnnnnnnnnnnnnnnnnnnnnnnnnnnnnnnnnnnnnnnnnnnnnnnnnnnnnnnnnnnnnnnnnnnnnnnnnnnnnnnnnnnnnnnnnnnnnnnnnnnnnnnnnnnnnnnnnnnnnnnnnnnnnnnnnnnnnnnnnnnnnnnnnnnnnnnnnnnnnnnnnnnnnnnnnnnnnnnnnnnnnnnnnnnnnnnnnnnnnnnnnnnnnnnnnnnnnnnnnnnnnnnnnnnnnnnnnnnnnnnnnnnnnnnnnnnnnnnnnnnnnnnnnnnnnnnnnnnnnnnnnnnnnnnnnnnnnnnnnnnnnnnnnnnnnnnnnnnnnnnnnnnnnnnnnnnnnnnnnnnnnnnnnnnnnnnnnnnnnnnnnnnnnnnnnnnnnnnnnnnnnnnnnnnnnnnnnnnnnnnnnnnnnnnnnnnnnnnnnnnnnnnnnnnnnnnnnnnnnnnnnnnnnnnnnnnnnnnnnnnnnnnnnnnnnnnnnnnnnnnnnnnnnnnnnnnnnnnnnnnnnnnnnnnnnnnnnnnnnnnnnnnnnnnnnnnnnnnnnnnnnnnnnnnnnnnnnnnnnnnnnnnnnnnnnnnnnnnnnnnnnnnnnnnnnnnnnnnnnnnnnnnnnnnnnnnnnnnnnnnnnnnnnnnnnnnnnnnnnnnnnnnnnnnnnnnnnnnnnnnnnnnnnnnnnnnnnnnnnnnnnnnnnnnnnnnnnnnnnnnnnnnnnnnnnnnnnnnnnnnnnnnnnnnnnnnnnnnnnnnnnnnnnnnnnnnnnnnnnnnnnnnnnnnnnnnnnnnnnnnnnnnnnnnnnnnnnnnnnnnnnnnnnnnnnnnnnnnnnnnnnnnnnnnnnnnnnnnnnnnnnnnnnnnnnnnnnnnnnnnnnnnnnnnnnnnnnnnnnnnnnnnnnnnnnnnnnnnnnnnnnnnnnnnnnnnnnnnnnnnnnnnnnnnnnnnnnnnnnnnnnnnnnnnnnnnnnnnnnnnnnnnnnnnnnnnnnnnnnnnnnnnnnnnnnnnnnnnnnnnnnnnnnnnnnnnnnnnnnnnnnnnnnnnnnnnnnnnnnnnnnnnnnnnnnnnnnnnnnnnnnnnnnnnnnnnnnnnnnnnnnnnnnnnnnnnnnnnnnnnnnnnnnnnnnnnnnnnnnnnnnnnnnnnnnnnnnnnnnnnnnnnnnnnnnnnnnnnnnnnnnnnnnnnnnnnnnnnnnnnnnnnnnnnnnnnnnnnnnnnnnnnnnnnnnnnnnnnnnnnnnnnnnnnnnnnnnnnnnnnnnnnnnnnnnnnnnnnnnnnnnnnnnnnnnnnnnnnnnnnnnnnnnnnnnnnnnnnnnnnnnnnnnnnnnnnnnnnnnnnnnnnnnnnnnnnnnnnnnnnnnnnnnnnnnnnnnnnnnnnnnnnnnnnnnnnnnnnnnnnnnnnnnnnnnnnnnnnnnnnnnnnnnnnnnnnnnnnnnnnnnnnnnnnnnnnnnnnnnnnnnnnnnnnnnnnnnnnnnnnnnnnnnnnnnnnnnnnnnnnnnnnnnnnnnnnnnnnnnnnnnnnnnnnnnnnnnnnnnnnnnnnnnnnnnnnnnnnnnnnnnnnnnnnnnnnnnnnnnnnnnnnnnnnnnnnnnnnnnnnnnnnnnnnnnnnnnnnnnnnnnnnnnnnnnnnnnnnnnnnnnnnnnnnnnnnnnnnnnnnnnnnnnnnnnnnnnnnnnnnnnnnnnnnnnnnnnnnnnnnnnnnnnnnnnnnnnnnnnnnnnnnnnnnnnnnnnnnnnnnnnnnnnnnnnnnnnnnnnnnnnnnnnnnnnnnnnnnnnnnnnnnnnnnnnnnnnnnnnnnnnnnnnnnnnnnnnnnnnnnnnnnnnnnnnnnnnnnnnnnnnnnnnnnnnnnnnnnnnnnnnnnnnnnnnnnnnnnnnnnnnnnnnnnnnnnnnnnnnnnnnnnnnnnnnnnnnnnnnnnnnnnnnnnnnnnnnnnnnnnnnnnnnnnnnnnnnnnnnnnnnnnnnnnnnnnnnnnnnnnnnnnnnnnnnnnnnnnnnnnnnnnnnnnnnnnnnnnnnnnnnnnnnnnnnnnnnnnnnnnnnnnnnnnnnnnnnnnnnnnnnnnnnnnnnnnnnnnnnnnnnnnnnnnnnnnnnnnnnnnnnnnnnnnnnnnnnnnnnnnnnnnnnnnnnnnnnnnnnnnnnnnnnnnnnnnnnnnnnnnnnnnnnnnnnnnnnnnnnnnnnnnnnnnnnnnnnnnnnnnnnnnnnnnnnnnnnnnnnnnnnnnnnnnnnnnnnnnnnnnnnnnnnnnnnnnnnnnnnnnnnnnnnnnnnnnnnnnnnnnnnnnnnnnnnnnnnnnnnnnnnnnnnnnnnnnnnnnnnnnnnnnnnnnnnnnnnnnnnnnnnnnnnnnnnnnnnnnnnnnnnnnnnnnnnnnnnnnnnnnnnnnnnnnnnnnnnnnnnnnnnnnnnnnnnnnnnnnnnnnnnnnnnnnnnnnnnnnnnnnnnnnnnnnnnnnnnnnnnnnnnnnnnnnnnnnnnnnnnnnnnnnnnnnnnnnnnnnnnnnnnnnnnnnnnnnnnnnnnnnnnnnnnnnnnnnnnnnnnnnnnnnnnnnnnnnnnnnnnnnnnnnnnnnnnnnnnnnnnnnnnnnnnnnnnnnnnnnnnnnnnnnnnnnnnnnnnnnnnnnnnnnnnnnnnnnnnnnnnnnnnnnnnnnnnnnnnnnnnnnnnnnnnnnnnnnnnnnnnnnnnnnnnnnnnnnnnnnnnnnnnnnnnnnnnnnnnnnnnnnnnnnnnnnnnnnnnnnnnnnnnnnnnnnnnnnnnnnnnnnnnnnnnnnnnnnnnnnnnnnnnnnnnnnnnnnnnnnnnnnnnnnnnnnnnnnnnnnnnnnnnnnnnnnnnnnnnnnnnnnnnnnnnnnnnnnnnnnnnnnnnnnnnnnnnnnnnnnnnnnnnnnnnnnnnnnnnnnnnnnnnnnnnnnnnnnnnnnnnnnnnnnnnnnnnnnnnnnnnnnnnnnnnnnnnnnnnnnnnnnnnnnnnnnnnnnnnnnnnnnnnnnnnnnnnnnnnnnnnnnnnnnnnnnnnnnnnnnnnnnnnnnnnnnnnnnnnnnnnnnnnnnnnnnnnnnnnnnnnnnnnnnnnnnnnnnnnnnnnnnnnnnnnnnnnnnnnnnnnnnnnnnnnnnnnnnnnnnnnnnnnnnnnnnnnnnnnnnnnnnnnnnnnnnnnnnnnnnnnnnnnnnnnnnnnnnnnnnnnnnnnnnnnnnnnnnnnnnnnnnnnnnnnnnnnnnnnnnnnnnnnnnnnnnnnnnnnnnnnnnnnnnnnnnnnnnnnnnnnnnnnnnnnnnnnnnnnnnnnnnnnnnnnnnnnnnnnnnnnnnnnnnnnnnnnnnnnnnnnnnnnnnnnnnnnnnnnnnnnnnnnnnnnnnnnnnnnnnnnnnnnnnnnnnnnnnnnnnnnnnnnnnnnnnnnnnnnnnnnnnnnnnnnnnnnnnnnnnnnnnnnnnnnnnnnnnnnnnnnnnnnnnnnnnnnnnnnnnnnnnnnnnnnnnnnnnnnnnnnnnnnnnnnnnnnnnnnnnnnnnnnnnnnnnnnnnnnnnnnnnnnnnnnnnnnnnnnnnnnnnnnnnnnnnnnnnnnnnnnnnnnnnnnnnnnnnnnnnnnnnnnnnnnnnnnnnnnnnnnnnnnnnnnnnnnnnnnnnnnnnnnnnnnnnnnnnnnnnnnnnnnnnnnnnnnnnnnnnnnnnnnnnnnnnnnnnnnnnnnnnnnnnnnnnnnnnnnnnnnnnnnnnnnnnnnnnnnnnnnnnnnnnnnnnnnnnnnnnnnnnnnnnnnnnnnnnnnnnnnnnnnnnnnnnnnnnnnnnnnnnnnnnnnnnnnnnnnnnnnnnnnnnnnnnnnnnnnnnnnnnnnnnnnnnnnnnnnnnnnnnnnnnnnnnnnnnnnnnnnnnnnnnnnnnnnnnnnnnnnnnnnnnnnnnnnnnnnnnnnnnnnnnnnnnnnnnnnnnnnnnnnnnnnnnnnnnnnnnnnnnnnnnnnnnnnnnnnnnnnnnnnnnnnnnnnnnnnnnnnnnnnnnnnnnnnnnnnnnnnnnnnnnnnnnnnnnnnnnnnnnnnnnnnnnnnnnnnnnnnnnnnnnnnnnnnnnnnnnnnnnnnnnnnnnnnnnnnnnnnnnnnnnnnnnnnnnnnnnnnnnnnnnnnnnnnnnnnnnnnnnnnnnnnnnnnnnnnnnnnnnnnnnnnnnnnnnnnnnnnnnnnnnnnnnnnnnnnnnnnnnnnnnnnnnnnnnnnnnnnnnnnnnnnnnnnnnnnnnnnnnnnnnnnnnnnnnnnnnnnnnnnnnnnnnnnnnnnnnnnnnnnnnnnnnnnnnnnnnnnnnnnnnnnnnnnnnnnnnnnnnnnnnnnnnnnnnnnnnnnnnnnnnnnnnnnnnnnnnnnnnnnnnnnnnnnnnnnnnnnnnnnnnnnnnnnnnnnnnnnnnnnnnnnnnnnnnnnnnnnnnnnnnnnnnnnnnnnnnnnnnnnnnnnnnnnnnnnnnnnnnnnnnnnnnnnnnnnnnnnnnnnnnnnnnnnnnnnnnnnnnnnnnnnnnnnnnnnnnnnnnnnnnnnnnnnnnnnnnnnnnnnnnnnnnnnnnnnnnnnnnnnnnnnnnnnnnnnnnnnnnnnnnnnnnnnnnnnnnnnnnnnnnnnnnnnnnnnnnnnnnnnnnnnnnnnnnnnnnnnnnnnnnnnnnnnnnnnnnnnnnnnnnnnnnnnnnnnnnnnnnnnnnnnnnnnnnnnnnnnnnnnnnnnnnnnnnnnnnnnnnnnnnnnnnnnnnnnnnnnnnnnnnnnnnnnnnnnnnnnnnnnnnnnnnnnnnnnnnnnnnnnnnnnnnnnnnnnnnnnnnnnnnnnnnnnnnnnnnnnnnnnnnnnnnnnnnnnnnnnnnnnnnnnnnnnnnnnnnnnnnnnnnnnnnnnnnnnnnnnnnnnnnnnnnnnnnnnnnnnnnnnnnnnnnnnnnnnnnnnnnnnnnnnnnnnnnnnnnnnnnnnnnnnnnnnnnnnnnnnnnnnnnnnnnnnnnnnnnnnnnnnnnnnnnnnnnnnnnnnnnnnnnnnnnnnnnnnnnnnnnnnnnnnnnnnnnnnnnnnnnnnnnnnnnnnnnnnnnnnnnnnnnnnnnnnnnnnnnnnnnnnnnnnnnnnnnnnnnnnnnnnnnnnnnnnnnnnnnnnnnnnnnnnnnnnnnnnnnnnnnnnnnnnnnnnnnnnnnnnnnnnnnnnnnnnnnnnnnnnnnnnnnnnnnnnnnnnnnnnnnnnnnnnnnnnnnnnnnnnnnnnnnnnnnnnnnnnnnnnnnnnnnnnnnnnnnnnnnnnnnnnnnnnnnnnnnnnnnnnnnnnnnnnnnnnnnnnnnnnnnnnnnnnnnnnnnnnnnnnnnnnnnnnnnnnnnnnnnnnnnnnnnnnnnnnnnnnnnnnnnnnnnnnnnnnnnnnnnnnnnnnnnnnnnnnnnnnnnnnnnnnnnnnnnnnnnnnnnnnnnnnnnnnnnnnnnnnnnnnnnnnnnnnnnnnnnnnnnnnnnnnnnnnnnnnnnnnnnnnnnnnnnnnnnnnnnnnnnnnnnnnnnnnnnnnnnnnnnnnnnnnnnnnnnnnnnnnnnnnnnnnnnnnnnnnnnnnnnnnnnnnnnnnnnnnnnnnnnnnnnnnnnnnnnnnnnnnnnnnnnnnnnnnnnnnnnnnnnnnnnnnnnnnnnnnnnnnnnnnnnnnnnnnnnnnnnnnnnnnnnnnnnnnnnnnnnnnnnnnnnnnnnnnnnnnnnnnnnnnnnnnnnnnnnnnnnnnnnnnnnnnnnnnnnnnnnnnnnnnnnnnnnnnnnnnnnnnnnnnnnnnnnnnnnnnnnnnnnnnnnnnnnnnnnnnnnnnnnnnnnnnnnnnnnnnnnnnnnnnnnnnnnnnnnnnnnnnnnnnnnnnnnnnnnnnnnnnnnnnnnnnnnnnnnnnnnnnnnnnnnnnnnnnnnnnnnnnnnnnnnnnnnnnnnnnnnnnnnnnnnnnnnnnnnnnnnnnnnnnnnnnnnnnnnnnnnnnnnnnnnnnnnnnnnnnnnnnnnnnnnnnnnnnnnnnnnnnnnnnnnnnnnnnnnnnnnnnnnnnnnnnnnnnnnnnnnnnnnnnnnnnnnnnnnnnnnnnnnnnnnnnnnnnnnnnnnnnnnnnnnnnnnnnnnnnnnnnnnnnnnnnnnnnnnnnnnnnnnnnnnnnnnnnnnnnnnnnnnnnnnnnnnnnnnnnnnnnnnnnnnnnnnnnnnnnnnnnnnnnnnnnnnnnnnnnnnnnnnnnnnnnnnnnnnnnnnnnnnnnnnnnnnnnnnnnnnnnnnnnnnnnnnnnnnnnnnnnnnnnnnnnnnnnnnnnnnnnnnnnnnnnnnnnnnnnnnnnnnnnnnnnnnnnnnnnnnnnnnnnnnnnnnnnnnnnnnnnnnnnnnnnnnnnnnnnnnnnnnnnnnnnnnnnnnnnnnnnnnnnnnnnnnnnnnnnnnnnnnnnnnnnnnnnnnnnnnnnnnnnnnnnnnnnnnnnnnnnnnnnnnnnnnnnnnnnnnnnnnnnnnnnnnnnnnnnnnnnnnnnnnnnnnnnnnnnnnnnnnnnnnnnnnnnnnnnnnnnnnnnnnnnnnnnnnnnnnnnnnnnnnnnnnnnnnnnnnnnnnnnnnnnnnnnnnnnnnnnnnnnnnnnnnnnnnnnnnnnnnnnnnnnnnnnnnnnnnnnnnnnnnnnnnnnnnnnnnnnnnnnnnnnnnnnnnnnnnnnnnnnnnnnnnnnnnnnnnnnnnnnnnnnnnnnnnnnnnnnnnnnnnnnnnnnnnnnnnnnnnnnnnnnnnnnnnnnnnnnnnnnnnnnnnnnnnnnnnnnnnnnnnnnnnnnnnnnnnnnnnnnnnnnnnnnnnnnnnnnnnnnnnnnnnnnnnnnnnnnnnnnnnnnnnnnnnnnnnnnnnnnnnnnnnnnnnnnnnnnnnnnnnnnnnnnnnnnnnnnnnnnnnnnnnnnnnnnnnnnnnnnnnnnnnnnnnnnnnnnnnnnnnnnnnnnnnnnnnnnnnnnnnnnnnnnnnnnnnnnnnnnnnnnnnnnnnnnnnnnnnnnnnnnnnnnnnnnnnnnnnnnnnnnnnnnnnnnnnnnnnnnnnnnnnnnnnnnnnnnnnnnnnnnnnnnnnnnnnnnnnnnnnnnnnnnnnnnnnnnnnnnnnnnnnnnnnnnnnnnnnnnnnnnnnnnnnnnnnnnnnnnnnnnnnnnnnnnnnnnnnnnnnnnnnnnnnnnnnnnnnnnnnnnnnnnnnnnnnnnnnnnnnnnnnnnnnnnnnnnnnnnnnnnnnnnnnnnnnnnnnnnnnnnnnnnnnnnnnnnnnnnnnnnnnnnnnnnnnnnnnnnnnnnnnnnnnnnnnnnnnnnnnnnnnnnnnnnnnnnnnnnnnnnnnnnnnnnnnnnnnnnnnnnnnnnnnnnnnnnnnnnnnnnnnnnnnnnnnnnnnnnnnnnnnnnnnnnnnnnnnnnnnnnnnnnnnnnnnnnnnnnnnnnnnnnnnnnnnnnnnnnnnnnnnnnnnnnnnnnnnnnnnnnnnnnnnnnnnnnnnnnnnnnnnnnnnnnnnnnnnnnnnnnnnnnnnnnnnnnnnnnnnnnnnnnnnnnnnnnnnnnnnnnnnnnnnnnnnnnnnnnnnnnnnnnnnnnnnnnnnnnnnnnnnnnnnnnnnnnnnnnnnnnnnnnnnnnnnnnnnnnnnnnnnnnnnnnnnnnnnnnnnnnnnnnnnnnnnnnnnnnnnnnnnnnnnnnnnnnnnnnnnnnnnnnnnnnnnnnnnnnnnnnnnnnnnnnnnnnnnnnnnnnnnnnnnnnnnnnnnnnnnnnnnnnnnnnnnnnnnnnnnnnnnnnnnnnnnnnnnnnnnnnnnnnnnnnnnnnnnnnnnnnnnnnnnnnnnnnnnnnnnnnnnnnnnnnnnnnnnnnnnnnnnnnnnnnnnnnnnnnnnnnnnnnnnnnnnnnnnnnnnnnnnnnnnnnnnnnnnnnnnnnnnnnnnnnnnnnnnnnnnnnnnnnnnnnnnnnnnnnnnnnnnnnnnnnnnnnnnnnnnnnnnnnnnnnnnnnnnnnnnnnnnnnnnnnnnnnnnnnnnnnnnnnnnnnnnnnnnnnnnnnnnnnnnnnnnnnnnnnnnnnnnnnnnnnnnnnnnnnnnnnnnnnnnnnnnnnnnnnnnnnnnnnnnnnnnnnnnnnnnnnnnnnnnnnnnnnnnnnnnnnnnnnnnnnnnnnnnnnnnnnnnnnnnnnnnnnnnnnnnnnnnnnnnnnnnnnnnnnnnnnnnnnnnnnnnnnnnnnnnnnnnnnnnnnnnnnnnnnnnnnnnnnnnnnnnnnnnnnnnnnnnnnnnnnnnnnnnnnnnnnnnnnnnnnnnnnnnnnnnnnnnnnnnnnnnnnnnnnnnnnnnnnnnnnnnnnnnnnnnnnnnnnnnnnnnnnnnnnnnnnnnnnnnnnnnnnnnnnnnnnnnnnnnnnnnnnnnnnnnnnnnnnnnnnnnnnnnnnnnnnnnnnnnnnnnnnnnnnnnnnnnnnnnnnnnnnnnnnnnnnnnnnnnnnnnnnnnnnnnnnnnnnnnnnnnnnnnnnnnnnnnnnnnnnnnnnnnnnnnnnnnnnnnnnnnnnnnnnnnnnnnnnnnnnnnnnnnnnnnnnnnnnnnnnnnnnnnnnnnnnnnnnnnnnnnnnnnnnnnnnnnnnnnnnnnnnnnnnnnnnnnnnnnnnnnnnnnnnnnnnnnnnnnnnnnnnnnnnnnnnnnnnnnnnnnnnnnnnnnnnnnnnnnnnnnnnnnnnnnnnnnnnnnnnnnnnnnnnnnnnnnnnnnnnnnnnnnnnnnnnnnnnnnnnnnnnnnnnnnnnnnnnnnnnnnnnnnnnnnnnnnnnnnnnnnnnnnnnnnnnnnnnnnnnnnnnnnnnnnnnnnnnnnnnnnnnnnnnnnnnnnnnnnnnnnnnnnnnnnnnnnnnnnnnnnnnnnnnnnnnnnnnnnnnnnnnnnnnnnnnnnnnnnnnnnnnnnnnnnnnnnnnnnnnnnnnnnnnnnnnnnnnnnnnnnnnnnnnnnnnnnnnnnnnnnnnnnnnnnnnnnnnnnnnnnnnnnnnnnnnnnnnnnnnnnnnnnnnnnnnnnnnnnnnnnnnnnnnnnnnnnnnnnnnnnnnnnnnnnnnnnnnnnnnnnnnnnnnnnnnnnnnnnnnnnnnnnnnnnnnnnnnnnnnnnnnnnnnnnnnnnnnnnnnnnnnnnnnnnnnnnnnnnnnnnnnnnnnnnnnnnnnnnnnnnnnnnnnnnnnnnnnnnnnnnnnnnnnnnnnnnnnnnnnnnnnnnnnnnnnnnnnnnnnnnnnnnnnnnnnnnnnnnnnnnnnnnnnnnnnnnnnnnnnnnnnnnnnnnnnnnnnnnnnnnnnnnnnnnnnnnnnnnnnnnnnnnnnnnnnnnnnnnnnnnnnnnnnnnnnnnnnnnnnnnnnnnnnnnnnnnnnnnnnnnnnnnnnnnnnnnnnnnnnnnnnnnnnnnnnnnnnnnnnnnnnnnnnnnnnnnnnnnnnnnnnnnnnnnnnnnnnnnnnnnnnnnnnnnnnnnnnnnnnnnnnnnnnnnnnnnnnnnnnnnnnnnnnnnnnnnnnnnnnnnnnnnnnnnnnnnnnnnnnnnnnnnnnnnnnnnnnnnnnnnnnnnnnnnnnnnnnnnnnnnnnnnnnnnnnnnnnnnnnnnnnnnnnnnnnnnnnnnnnnnnnnnnnnnnnnnnnnnnnnnnnnnnnnnnnnnnnnnnnnnnnnnnnnnnnnnnnnnnnnnnnnnnnnnnnnnnnnnnnnnnnnnnnnnnnnnnnnnnnnnnnnnnnnnnnnnnnnnnnnnnnnnnnnnnnnnnnnnnnnnnnnnnnnnnnnnnnnnnnnnnnnnnnnnnnnnnnnnnnnnnnnnnnnnnnnnnnnnnnnnnnnnnnnnnnnnnnnnnnnnnnnnnnnnnnnnnnnnnnnnnnnnnnnnnnnnnnnnnnnnnnnnnnnnnnnnnnnnnnnnnnnnnnnnnnnnnnnnnnnnnnnnnnnnnnnnnnnnnnnnnnnnnnnnnnnnnnnnnnnnnnnnnnnnnnnnnnnnnnnnnnnnnnnnnnnnnnnnnnnnnnnnnnnnnnnnnnnnnnnnnnnnnnnnnnnnnnnnnnnnnnnnnnnnnnnnnnnnnnnnnnnnnnnnnnnnnnnnnnnnnnnnnnnnnnnnnnnnnnnnnnnnnnnnnnnnnnnnnnnnnnnnnnnnnnnnnnnnnnnnnnnnnnnnnnnnnnnnnnnnnnnnnnnnnnnnnnnnnnnnnnnnnnnnnnnnnnnnnnnnnnnnnnnnnnnnnnnnnnnnnnnnnnnnnnnnnnnnnnnnnnnnnnnnnnnnnnnnnnnnnnnnnnnnnnnnnnnnnnnnnnnnnnnnnnnnnnnnnnnnnnnnnnnnnnnnnnnnnnnnnnnnnnnnnnnnnnnnnnnnnnnnnnnnnnnnnnnnnnnnnnnnnnnnnnnnnnnnnnnnnnnnnnnnnnnnnnnnnnnnnnnnnnnnnnnnnnnnnnnnnnnnnnnnnnnnnnnnnnnnnnnnnnnnnnnnnnnnnnnnnnnnnnnnnnnnnnnnnnnnnnnnnnnnnnnnnnnnnnnnnnnnnnnnnnnnnnnnnnnnnnnnnnnnnnnnnnnnnnnnnnnnnnnnnnnnnnnnnnnnnnnnnnnnnnnnnnnnnnnnnnnnnnnnnnnnnnnnnnnnnnnnnnnnnnnnnnnnnnnnnnnnnnnnnnnnnnnnnnnnnnnnnnnnnnnnnnnnnnnnnnnnnnnnnnnnnnnnnnnnnnnnnnnnnnnnnnnnnnnnnnnnnnnnnnnnnnnnnnnnnnnnnnnnnnnnnnnnnnnnnnnnnnnnnnnnnnnnnnnnnnnnnnnnnnnnnnnnnnnnnnnnnnnnnnnnnnnnnnnnnnnnnnnnnnnnnnnnnnnnnnnnnnnnnnnnnnnnnnnnnnnnnnnnnnnnnnnnnnnnnnnnnnnnnnnnnnnnnnnnnnnnnnnnnnnnnnnnnnnnnnnnnnnnnnnnnnnnnnnnnnnnnnnnnnnnnnnnnnnnnnnnnnnnnnnnnnnnnnnnnnnnnnnnnnnnnnnnnnnnnnnnnnnnnnnnnnnnnnnnnnnnnnnnnnnnnnnnnnnnnnnnnnnnnnnnnnnnnnnnnnnnnnnnnnnnnnnnnnnnnnnnnnnnnnnnnnnnnnnnnnnnnnnnnnnnnnnnnnnnnnnnnnnnnnnnnnnnnnnnnnnnnnnnnnnnnnnnnnnnnnnnnnnnnnnnnnnnnnnnnnnnnnnnnnnnnnnnnnnnnnnnnnnnnnnnnnnnnnnnnnnnnnnnnnnnnnnnnnnnnnnnnnnnnnnnnnnnnnnnnnnnnnnnnnnnnnnnnnnnnnnnnnnnnnnnnnnnnnnnnnnnnnnnnnnnnnnnnnnnnnnnnnnnnnnnnnnnnnnnnnnnnnnnnnnnnnnnnnnnnnnnnnnnnnnnnnnnnnnnnnnnnnnnnnnnnnnnnnnnnnnnnnnnnnnnnnnnnnnnnnnnnnnnnnnnnnnnnnnnnnnnnnnnnnnnnnnnnnnnnnnnnnnnnnnnnnnnnnnnnnnnnnnnnnnnnnnnnnnnnnnnnnnnnnnnnnnnnnnnnnnnnnnnnnnnnnnnnnnnnnnnnnnnnnnnnnnnnnnnnnnnnnnnnnnnnnnnnnnnnnnnnnnnnnnnnnnnnnnnnnnnnnnnnnnnnnnnnnnnnnnnnnnnnnnnnnnnnnnnnnnnnnnnnnnnnnnnnnnnnnnnnnnnnnnnnnnnnnnnnnnnnnnnnnnnnnnnnnnnnnnnnnnnnnnnnnnnnnnnnnnnnnnnnnnnnnnnnnnnnnnnnnnnnnnnnnnnnnnnnnnnnnnnnnnnnnnnnnnnnnnnnnnnnnnnnnnnnnnnnnnnnnnnnnnnnnnnnnnnnnnnnnnnnnnnnnnnnnnnnnnnnnnnnnnnnnnnnnnnnnnnnnnnnnnnnnnnnnnnnnnnnnnnnnnnnnnnnnnnnnnnnnnnnnnnnnnnnnnnnnnnnnnnnnnnnnnnnnnnnnnnnnnnnnnnnnnnnnnnnnnnnnnnnnnnnnnnnnnnnnnnnnnnnnnnnnnnnnnnnnnnnnnnnnnnnnnnnnnnnnnnnnnnnnnnnnnnnnnnnnnnnnnnnnnnnnnnnnnnnnnnnnnnnnnnnnnnnnnnnnnnnnnnnnnnnnnnnnnnnnnnnnnnnnnnnnnnnnnnnnnnnnnnnnnnnnnnnnnnnnnnnnnnnnnnnnnnnnnnnnnnnnnnnnnnnnnnnnnnnnnnnnnnnnnnnnnnnnnnnnnnnnnnnnnnnnnnnnnnnnnnnnnnnnnnnnnnnnnnnnnnnnnnnnnnnnnnnnnnnnnnnnnnnnnnnnnnnnnnnnnnnnnnnnnnnnnnnnnnnnnnnnnnnnnnnnnnnnnnnnnnnnnnnnnnnnnnnnnnnnnnnnnnnnnnnnnnnnnnnnnnnnnnnnnnnnnnnnnnnnnnnnnnnnnnnnnnnnnnnnnnnnnnnnnnnnnnnnnnnnnnnnnnnnnnnnnnnnnnnnnnnnnnnnnnnnnnnnnnnnnnnnnnnnnnnnnnnnnnnnnnnnnnnnnnnnnnnnnnnnnnnnnnnnnnnnnnnnnnnnnnnnnnnnnnnnnnnnnnnnnnnnnnnnnnnnnnnnnnnnnnnnnnnnnnnnnnnnnnnnnnnnnnnnnnnnnnnnnnnnnnnnnnnnnnnnnnnnnnnnnnnnnnnnnnnnnnnnnnnnnnnnnnnnnnnnnnnnnnnnnnnnnnnnnnnnnnnnnnnnnnnnnnnnnnnnnnnnnnnnnnnnnnnnnnnnnnnnnnnnnnnnnnnnnnnnnnnnnnnnnnnnnnnnnnnnnnnnnnnnnnnnnnnnnnnnnnnnnnnnnnnnnnnnnnnnnnnnnnnnnnnnnnnnnnnnnnnnnnnnnnnnnnnnnnnnnnnnnnnnnnnnnnnnnnnnnnnnnnnnnnnnnnnnnnnnnnnnnnnnnnnnnnnnnnnnnnnnnnnnnnnnnnnnnnnnnnnnnnnnnnnnnnnnnnnnnnnnnnnnnnnnnnnnnnnnnnnnnnnnnnnnnnnnnnnnnnnnnnnnnnnnnnnnnnnnnnnnnnnnnnnnnnnnnnnnnnnnnnnnnnnnnnnnnnnnnnnnnnnnnnnnnnnnnnnnnnnnnnnnnnnnnnnnnnnnnnnnnnnnnnnnnnnnnnnnnnnnnnnnnnnnnnnnnnnnnnnnnnnnnnnnnnnnnnnnnnnnnnnnnnnnnnnnnnnnnnnnnnnnnnnnnnnnnnnnnnnnnnnnnnnnnnnnnnnnnnnnnnnnnnnnnnnnnnnnnnnnnnnnnnnnnnnnnnnnnnnnnnnnnnnnnnnnnnnnnnnnnnnnnnnnnnnnnnnnnnnnnnnnnnnnnnnnnnnnnnnnnnnnnnnnnnnnnnnnnnnnnnnnnnnnnnnnnnnnnnnnnnnnnnnnnnnnnnnnnnnnnnnnnnnnnnnnnnnnnnnnnnnnnnnnnnnnnnnnnnnnnnnnnnnnnnnnnnnnnnnnnnnnnnnnnnnnnnnnnnnnnnnnnnnnnnnnnnnnnnnnnnnnnnnnnnnnnnnnnnnnnnnnnnnnnnnnnnnnnnnnnnnnnnnnnnnnnnnnnnnnnnnnnnnnnnnnnnnnnnnnnnnnnnnnnnnnnnnnnnnnnnnnnnnnnnnnnnnnnnnnnnnnnnnnnnnnnnnnnnnnnnnnnnnnnnnnnnnnnnnnnnnnnnnnnnnnnnnnnnnnnnnnnnnnnnnnnnnnnnnnnnnnnnnnnnnnnnnnnnnnnnnnnnnnnnnnnnnnnnnnnnnnnnnnnnnnnnnnnnnnnnnnnnnnnnnnnnnnnnnnnnnnnnnnnnnnnnnnnnnnnnnnnnnnnnnnnnnnnnnnnnnnnnnnnnnnnnnnnnnnnnnnnnnnnnnnnnnnnnnnnnnnnnnnnnnnnnnnnnnnnnnnnnnnnnnnnnnnnnnnnnnnnnnnnnnnnnnnnnnnnnnnnnnnnnnnnnnnnnnnnnnnnnnnnnnnnnnnnnnnnnnnnnnnnnnnnnnnnnnnnnnnnnnnnnnnnnnnnnnnnnnnnnnnnnnnnnnnnnnnnnnnnnnnnnnnnnnnnnnnnnnnnnnnnnnnnnnnnnnnnnnnnnnnnnnnnnnnnnnnnnnnnnnnnnnnnnnnnnnnnnnnnnnnnnnnnnnnnnnnnnnnnnnnnnnnnnnnnnnnnnnnnnnnnnnnnnnnnnnnnnnnnnnnnnnnnnnnnnnnnnnnnnnnnnnnnnnnnnnnnnnnnnnnnnnnnnnnnnnnnnnnnnnnnnnnnnnnnnnnnnnnnnnnnnnnnnnnnnnnnnnnnnnnnnnnnnnnnnnnnnnnnnnnnnnnnnnnnnnnnnnnnnnnnnnnnnnnnnnnnnnnnnnnnnnnnnnnnnnnnnnnnnnnnnnnnnnnnnnnnnnnnnnnnnnnnnnnnnnnnnnnnnnnnnnnnnnnnnnnnnnnnnnnnnnnnnnnnnnnnnnnnnnnnnnnnnnnnnnnnnnnnnnnnnnnnnnnnnnnnnnnnnnnnnnnnnnnnnnnnnnnnnnnnnnnnnnnnnnnnnnnnnnnnnnnnnnnnnnnnnnnnnnnnnnnnnnnnnnnnnnnnnnnnnnnnnnnnnnnnnnnnnnnnnnnnnnnnnnnnnnnnnnnnnnnnnnnnnnnnnnnnnnnnnnnnnnnnnnnnnnnnnnnnnnnnnnnnnnnnnnnnnnnnnnnnnnnnnnnnnnnnnnnnnnnnnnnnnnnnnnnnnnnnnnnnnnnnnnnnnnnnnnnnnnnnnnnnnnnnnnnnnnnnnnnnnnnnnnnnnnnnnnnnnnnnnnnnnnnnnnnnnnnnnnnnnnnnnnnnnnnnnnnnnnnnnnnnnnnnnnnnnnnnnnnnnnnnnnnnnnnnnnnnnnnnnnnnnnnnnnnnnnnnnnnnnnnnnnnnnnnnnnnnnnnnnnnnnnnnnnnnnnnnnnnnnnnnnnnnnnnnnnnnnnnnnnnnnnnnnnnnnnnnnnnnnnnnnnnnnnnnnnnnnnnnnnnnnnnnnnnnnnnnnnnnnnnnnnnnnnnnnnnnnnnnnnnnnnnnnnnnnnnnnnnnnnnnnnnnnnnnnnnnnnnnnnnnnnnnnnnnnnnnnnnnnnnnnnnnnnnnnnnnnnnnnnnnnnnnnnnnnnnnnnnnnnnnnnnnnnnnnnnnnnnnnnnnnnnnnnnnnnnnnnnnnnnnnnnnnnnnnnnnnnnnnnnnnnnnnnnnnnnnnnnnnnnnnnnnnnnnnnnnnnnnnnnnnnnnnnnnnnnnnnnnnnnnnnnnnnnnnnnnnnnnnnnnnnnnnnnnnnnnnnnnnnnnnnnnnnnnnnnnnnnnnnnnnnnnnnnnnnnnnnnnnnnnnnnnnnnnnnnnnnnnnnnnnnnnnnnnnnnnnnnnnnnnnnnnnnnnnnnnnnnnnnnnnnnnnnnnnnnnnnnnnnnnnnnnnnnnnnnnnnnnnnnnnnnnnnnnnnnnnnnnnnnnnnnnnnnnnnnnnnnnnnnnnnnnnnnnnnnnnnnnnnnnnnnnnnnnnnnnnnnnnnnnnnnnnnnnnnnnnnnnnnnnnnnnnnnnnnnnnnnnnnnnnnnnnnnnnnnnnnnnnnnnnnnnnnnnnnnnnnnnnnnnnnnnnnnnnnnnnnnnnnnnnnnnnnnnnnnnnnnnnnnnnnnnnnnnnnnnnnnnnnnnnnnnnnnnnnnnnnnnnnnnnnnnnnnnnnnnnnnnnnnnnnnnnnnnnnnnnnnnnnnnnnnnnnnnnnnnnnnnnnnnnnnnnnnnnnnnnnnnnnnnnnnnnnnnnnnnnnnnnnnnnnnnnnnnnnnnnnnnnnnnnnnnnnnnnnnnnnnnnnnnnnnnnnnnnnnnnnnnnnnnnnnnnnnnnnnnnnnnnnnnnnnnnnnnnnnnnnnnnnnnnnnnnnnnnnnnnnnnnnnnnnnnnnnnnnnnnnnnnnnnnnnnnnnnnnnnnnnnnnnnnnnnnnnnnnnnnnnnnnnnnnnnnnnnnnnnnnnnnnnnnnnnnnnnnnnnnnnnnnnnnnnnnnnnnnnnnnnnnnnnnnnnnnnnnnnnnnnnnnnnnnnnnnnnnnnnnnnnnnnnnnnnnnnnnnnnnnnnnnnnnnnnnnnnnnnnnnnnnnnnnnnnnnnnnnnnnnnnnnnnnnnnnnnnnnnnnnnnnnnnnnnnnnnnnnnnnnnnnnnnnnnnnnnnnnnnnnnnnnnnnnnnnnnnnnnnnnnnnnnnnnnnnnnnnnnnnnnnnnnnnnnnnnnnnnnnnnnnnnnnnnnnnnnnnnnnnnnnnnnnnnnnnnnnnnnnnnnnnnnnnnnnnnnnnnnnnnnnnnnnnnnnnnnnnnnnnnnnnnnnnnnnnnnnnnnnnnnnnnnnnnnnnnnnnnnnnnnnnnnnnnnnnnnnnnnnnnnnnnnnnnnnnnnnnnnnnnnnnnnnnnnnnnnnnnnnnnnnnnnnnnnnnnnnnnnnnnnnnnnnnnnnnnnnnnnnnnnnnnnnnnnnnnnnnnnnnnnnnnnnnnnnnnnnnnnnnnnnnnnnnnnnnnnnnnnnnnnnnnnnnnnnnnnnnnnnnnnnnnnnnnnnnnnnnnnnnnnnnnnnnnnnnnnnnnnnnnnnnnnnnnnnnnnnnnnnnnnnnnnnnnnnnnnnnnnnnnnnnnnnnnnnnnnnnnnnnnnnnnnnnnnnnnnnnnnnnnnnnnnnnnnnnnnnnnnnnnnnnnnnnnnnnnnnnnnnnnnnnnnnnnnnnnnnnnnnnnnnnnnnnnnnnnnnnnnnnnnnnnnnnnnnnnnnnnnnnnnnnnnnnnnnnnnnnnnnnnnnnnnnnnnnnnnnnnnnnnnnnnnnnnnnnnnnnnnnnnnnnnnnnnnnnnnnnnnnnnnnnnnnnnnnnnnnnnnnnnnnnnnnnnnnnnnnnnnnnnnnnnnnnnnnnnnnnnnnnnnnnnnnnnnnnnnnnnnnnnnnnnnnnnnnnnnnnnnnnnnnnnnnnnnnnnnnnnnnnnnnnnnnnnnnnnnnnnnnnnnnnnnnnnnnnnnnnnnnnnnnnnnnnnnnnnnnnnnnnnnnnnnnnnnnnnnnnnnnnnnnnnnnnnnnnnnnnnnnnnnnnnnnnnnnnnnnnnnnnnnnnnnnnnnnnnnnnnnnnnnnnnnnnnnnnnnnnnnnnnnnnnnnnnnnnnnnnnnnnnnnnnnnnnnnnnnnnnnnnnnnnnnnnnnnnnnnnnnnnnnnnnnnnnnnnnnnnnnnnnnnnnnnnnnnnnnnnnnnnnnnnnnnnnnnnnnnnnnnnnnnnnnnnnnnnnnnnnnnnnnnnnnnnnnnnnnnnnnnnnnnnnnnnnnnnnnnnnnnnnnnnnnnnnnnnnnnnnnnnnnnnnnnnnnnnnnnnnnnnnnnnnnnnnnnnnnnnnnnnnnnnnnnnnnnnnnnnnnnnnnnnnnnnnnnnnnnnnnnnnnnnnnnnnnnnnnnnnnnnnnnnnnnnnnnnnnnnnnnnnnnnnnnnnnnnnnnnnnnnnnnnnnnnnnnnnnnnnnnnnnnnnnnnnnnnnnnnnnnnnnnnnnnnnnnnnnnnnnnnnnnnnnnnnnnnnnnnnnnnnnnnnnnnnnnnnnnnnnnnnnnnnnnnnnnnnnnnnnnnnnnnnnnnnnnnnnnnnnnnnnnnnnnnnnnnnnnnnnnnnnnnnnnnnnnnnnnnnnnnnnnnnnnnnnnnnnnnnnnnnnnnnnnnnnnnnnnnnnnnnnnnnnnnnnnnnnnnnnnnnnnnnnnnnnnnnnnnnnnnnnnnnnnnnnnnnnnnnnnnnnnnnnnnnnnnnnnnnnnnnnnnnnnnnnnnnnnnnnnnnnnnnnnnnnnnnnnnnnnnnnnnnnnnnnnnnnnnnnnnnnnnnnnnnnnnnnnnnnnnnnnnnnnnnnnnnnnnnnnnnnnnnnnnnnnnnnnnnnnnnnnnnnnnnnnnnnnnnnnnnnnnnnnnnnnnnnnnnnnnnnnnnnnnnnnnnnnnnnnnnnnnnnnnnnnnnnnnnnnnnnnnnnnnnnnnnnnnnnnnnnnnnnnnnnnnnnnnnnnnnnnnnnnnnnnnnnnnnnnnnnnnnnnnnnnnnnnnnnnnnnnnnnnnnnnnnnnnnnnnnnnnnnnnnnnnnnnnnnnnnnnnnnnnnnnnnnnnnnnnnnnnnnnnnnnnnnnnnnnnnnnnnnnnnnnnnnnnnnnnnnnnnnnnnnnnnnnnnnnnnnnnnnnnnnnnnnnnnnnnnnnnnnnnnnnnnnnnnnnnnnnnnnnnnnnnnnnnnnnnnnnnnnnnnnnnnnnnnnnnnnnnnnnnnnnnnnnnnnnnnnnnnnnnnnnnnnnnnnnnnnnnnnnnnnnnnnnnnnnnnnnnnnnnnnnnnnnnnnnnnnnnnnnnnnnnnnnnnnnnnnnnnnnnnnnnnnnnnnnnnnnnnnnnnnnnnnnnnnnnnnnnnnnnnnnnnnnnnnnnnnnnnnnnnnnnnnnnnnnnnnnnnnnnnnnnnnnnnnnnnnnnnnnnnnnnnnnnnnnnnnnnnnnnnnnnnnnnnnnnnnnnnnnnnnnnnnnnnnnnnnnnnnnnnnnnnnnnnnnnnnnnnnnnnnnnnnnnnnnnnnnnnnnnnnnnnnnnnnnnnnnnnnnnnnnnnnnnnnnnnnnnnnnnnnnnnnnnnnnnnnnnnnnnnnnnnnnnnnnnnnnnnnnnnnnnnnnnnnnnnnnnnnnnnnnnnnnnnnnnnnnnnnnnnnnnnnnnnnnnnnnnnnnnnnnnnnnnnnnnnnnnnnnnnnnnnnnnnnnnnnnnnnnnnnnnnnnnnnnnnnnnnnnnnnnnnnnnnnnnnnnnnnnnnnnnnnnnnnnnnnnnnnnnnnnnnnnnnnnnnnnnnnnnnnnnnnnnnnnnnnnnnnnnnnnnnnnnnnnnnnnnnnnnnnnnnnnnnnnnnnnnnnnnnnnnnnnnnnnnnnnnnnnnnnnnnnnnnnnnnnnnnnnnnnnnnnnnnnnnnnnnnnnnnnnnnnnnnnnnnnnnnnnnnnnnnnnnnnnnnnnnnnnnnnnnnnnnnnnnnnnnnnnnnnnnnnnnnnnnnnnnnnnnnnnnnnnnnnnnnnnnnnnnnnnnnnnnnnnnnnnnnnnnnnnnnnnnnnnnnnnnnnnnnnnnnnnnnnnnnnnnnnnnnnnnnnnnnnnnnnnnnnnnnnnnnnnnnnnnnnnnnnnnnnnnnnnnnnnnnnnnnnnnnnnnnnnnnnnnnnnnnnnnnnnnnnnnnnnnnnnnnnnnnnnnnnnnnnnnnnnnnnnnnnnnnnnnnnnnnnnnnnnnnnnnnnnnnnnnnnnnnnnnnnnnnnnnnnnnnnnnnnnnnnnnnnnnnnnnnnnnnnnnnnnnnnnnnnnnnnnnnnnnnnnnnnnnnnnnnnnnnnnnnnnnnnnnnnnnnnnnnnnnnnnnnnnnnnnnnnnnnnnnnnnnnnnnnnnnnnnnnnnnnnnnnnnnnnnnnnnnnnnnnnnnnnnnnnnnnnnnnnnnnnnnnnnnnnnnnnnnnnnnnnnnnnnnnnnnnnnnnnnnnnnnnnnnnnnnnnnnnnnnnnnnnnnnnnnnnnnnnnnnnnnnnnnnnnnnnnnnnnnnnnnnnnnnnnnnnnnnnnnnnnnnnnnnnnnnnnnnnnnnnnnnnnnnnnnnnnnnnnnnnnnnnnnnnnnnnnnnnnnnnnnnnnnnnnnnnnnnnnnnnnnnnnnnnnnnnnnnnnnnnnnnnnnnnnnnnnnnnnnnnnnnnnnnnnnnnnnnnnnnnnnnnnnnnnnnnnnnnnnnnnnnnnnnnnnnnnnnnnnnnnnnnnnnnnnnnnnnnnnnnnnnnnnnnnnnnnnnnnnnnnnnnnnnnnnnnnnnnnnnnnnnnnnnnnnnnnnnnnnnnnnnnnnnnnnnnnnnnnnnnnnnnnnnnnnnnnnnnnnnnnnnnnnnnnnnnnnnnnnnnnnnnnnnnnnnnnnnnnnnnnnnnnnnnnnnnnnnnnnnnnnnnnnnnnnnnnnnnnnnnnnnnnnnnnnnnnnnnnnnnnnnnnnnnnnnnnnnnnnnnnnnnnnnnnnnnnnnnnnnnnnnnnnnnnnnnnnnnnnnnnnnnnnnnnnnnnnnnnnnnnnnnnnnnnnnnnnnnnnnnnnnnnnnnnnnnnnnnnnnnnnnnnnnnnnnnnnnnnnnnnnnnnnnnnnnnnnnnnnnnnnnnnnnnnnnnnnnnnnnnnnnnnnnnnnnnnnnnnnnnnnnnnnnnnnnnnnnnnnnnnnnnnnnnnnnnnnnnnnnnnnnnnnnnnnnnnnnnnnnnnnnnnnnnnnnnnnnnnnnnnnnnnnnnnnnnnnnnnnnnnnnnnnnnnnnnnnnnnnnnnnnnnnnnnnnnnnnnnnnnnnnnnnnnnnnnnnnnnnnnnnnnnnnnnnnnnnnnnnnnnnnnnnnnnnnnnnnnnnnnnnnnnnnnnnnnnnnnnnnnnnnnnnnnnnnnnnnnnnnnnnnnnnnnnnnnnnnnnnnnnnnnnnnnnnnnnnnnnnnnnnnnnnnnnnnnnnnnnnnnnnnnnnnnnnnnnnnnnnnnnnnnnnnnnnnnnnnnnnnnnnnnnnnnnnnnnnnnnnnnnnnnnnnnnnnnnnnnnnnnnnnnnnnnnnnnnnnnnnnnnnnnnnnnnnnnnnnnnnnnnnnnnnnnnnnnnnnnnnnnnnnnnnnnnnnnnnnnnnnnnnnnnnnnnnnnnnnnnnnnnnnnnnnnnnnnnnnnnnnnnnnnnnnnnnnnnnnnnnnnnnnnnnnnnnnnnnnnnnnnnnnnnnnnnnnnnnnnnnnnnnnnnnnnnnnnnnnnnnnnnnnnnnnnnnnnnnnnnnnnnnnnnnnnnnnnnnnnnnnnnnnnnnnnnnnnnnnnnnnnnnnnnnnnnnnnnnnnnnnnnnnnnnnnnnnnnnnnnnnnnnnnnnnnnnnnnnnnnnnnnnnnnnnnnnnnnnnnnnnnnnnnnnnnnnnnnnnnnnnnnnnnnnnnnnnnnnnnnnnnnnnnnnnnnnnnnnnnnnnnnnnnnnnnnnnnnnnnnnnnnnnnnnnnnnnnnnnnnnnnnnnnnnnnnnnnnnnnnnnnnnnnnnnnnnnnnnnnnnnnnnnnnnnnnnnnnnnnnnnnnnnnnnnnnnnnnnnnnnnnnnnnnnnnnnnnnnnnnnnnnnnnnnnnnnnnnnnnnnnnnnnnnnnnnnnnnnnnnnnnnnnnnnnnnnnnnnnnnnnnnnnnnnnnnnnnnnnnnnnnnnnnnnnnnnnnnnnnnnnnnnnnnnnnnnnnnnnnnnnnnnnnnnnnnnnnnnnnnnnnnnnnnnnnnnnnnnnnnnnnnnnnnnnnnnnnnnnnnnnnnnnnnnnnnnnnnnnnnnnnnnnnnnnnnnnnnnnnnnnnnnnnnnnnnnnnnnnnnnnnnnnnnnnnnnnnnnnnnnnnnnnnnnnnnnnnnnnnnnnnnnnnnnnnnnnnnnnnnnnnnnnnnnnnnnnnnnnnnnnnnnnnnnnnnnnnnnnnnnnnnnnnnnnnnnnnnnnnnnnnnnnnnnnnnnnnnnnnnnnnnnnnnnnnnnnnnnnnnnnnnnnnnnnnnnnnnnnnnnnnnnnnnnnnnnnnnnnnnnnnnnnnnnnnnnnnnnnnnnnnnnnnnnnnnnnnnnnnnnnnnnnnnnnnnnnnnnnnnnnnnnnnnnnnnnnnnnnnnnnnnnnnnnnnnnnnnnnnnnnnnnnnnnnnnnnnnnnnnnnnnnnnnnnnnnnnnnnnnnnnnnnnnnnnnnnnnnnnnnnnnnnnnnnnnnnnnnnnnnnnnnnnnnnnnnnnnnnnnnnnnnnnnnnnnnnnnnnnnnnnnnnnnnnnnnnnnnnnnnnnnnnnnnnnnnnnnnnnnnnnnnnnnnnnnnnnnnnnnnnnnnnnnnnnnnnnnnnnnnnnnnnnnnnnnnnnnnnnnnnnnnnnnnnnnnnnnnnnnnnnnnnnnnnnnnnnnnnnnnnnnnnnnnnnnnnnnnnnnnnnnnnnnnnnnnnnnnnnnnnnnnnnnnnnnnnnnnnnnnnnnnnnnnnnnnnnnnnnnnnnnnnnnnnnnnnnnnnnnnnnnnnnnnnnnnnnnnnnnnnnnnnnnnnnnnnnnnnnnnnnnnnnnnnnnnnnnnnnnnnnnnnnnnnnnnnnnnnnnnnnnnnnnnnnnnnnnnnnnnnnnnnnnnnnnnnnnnnnnnnnnnnnnnnnnnnnnnnnnnnnnnnnnnnnnnnnnnnnnnnnnnnnnnnnnnnnnnnnnnnnnnnnnnnnnnnnnnnnnnnnnnnnnnnnnnnnnnnnnnnnnnnnnnnnnnnnnnnnnnnnnnnnnnnnnnnnnnnnnnnnnnnnnnnnnnnnnnnnnnnnnnnnnnnnnnnnnnnnnnnnnnnnnnnnnnnnnnnnnnnnnnnnnnnnnnnnnnnnnnnnnnnnnnnnnnnnnnnnnnnnnnnnnnnnnnnnnnnnnnnnnnnnnnnnnnnnnnnnnnnnnnnnnnnnnnnnnnnnnnnnnnnnnnnnnnnnnnnnnnnnnnnnnnnnnnnnnnnnnnnnnnnnnnnnnnnnnnnnnnnnnnnnnnnnnnnnnnnnnnnnnnnnnnnnnnnnnnnnnnnnnnnnnnnnnnnnnnnnnnnnnnnnnnnnnnnnnnnnnnnnnnnnnnnnnnnnnnnnnnnnnnnnnnnnnnnnnnnnnnnnnnnnnnnnnnnnnnnnnnnnnnnnnnnnnnnnnnnnnnnnnnnnnnnnnnnnnnnnnnnnnnnnnnnnnnnnnnnnnnnnnnnnnnnnnnnnnnnnnnnnnnnnnnnnnnnnnnnnnnnnnnnnnnnnnnnnnnnnnnnnnnnnnnnnnnnnnnnnnnnnnnnnnnnnnnnnnnnnnnnnnnnnnnnnnnnnnnnnnnnnnnnnnnnnnnnnnnnnnnnnnnnnnnnnnnnnnnnnnnnnnnnnnnnnnnnnnnnnnnnnnnnnnnnnnnnnnnnnnnnnnnnnnnnnnnnnnnnnnnnnnnnnnnnnnnnnnnnnnnnnnnnnnnnnnnnnnnnnnnnnnnnnnnnnnnnnnnnnnnnnnnnnnnnnnnnnnnnnnnnnnnnnnnnnnnnnnnnnnnnnnnnnnnnnnnnnnnnnnnnnnnnnnnnnnnnnnnnnnnnnnnnnnnnnnnnnnnnnnnnnnnnnnnnnnnnnnnnnnnnnnnnnnnnnnnnnnnnnnnnnnnnnnnnnnnnnnnnnnnnnnnnnnnnnnnnnnnnnnnnnnnnnnnnnnnnnnnnnnnnnnnnnnnnnnnnnnnnnnnnnnnnnnnnnnnnnnnnnnnnnnnnnnnnnnnnnnnnnnnnnnnnnnnnnnnnnnnnnnnnnnnnnnnnnnnnnnnnnnnnnnnnnnnnnnnnnnnnnnnnnnnnnnnnnnnnnnnnnnnnnnnnnnnnnnnnnnnnnnnnnnnnnnnnnnnnnnnnnnnnnnnnnnnnnnnnnnnnnnnnnnnnnnnnnnnnnnnnnnnnnnnnnnnnnnnnnnnnnnnnnnnnnnnnnnnnnnnnnnnnnnnnnnnnnnnnnnnnnnnnnnnnnnnnnnnnnnnnnnnnnnnnnnnnnnnnnnnnnnnnnnnnnnnnnnnnnnnnnnnnnnnnnnnnnnnnnnnnnnnnnnnnnnnnnnnnnnnnnnnnnnnnnnnnnnnnnnnnnnnnnnnnnnnnnnnnnnnnnnnnnnnnnnnnnnnnnnnnnnnnnnnnnnnnnnnnnnnnnnnnnnnnnnngatcctttacacagaacagatttgaaacactctttttgtggaatttccaagtggagatttcagccgatttgaagtcaatcgtagaaaaggagatatcttcgtataaaaacaagacagaatgattttcagaaactgctttgtgatgtgtgcgttcaactcacagagtttcaactttcttttcatagagcagttaggaaacactctgtttgtaaagtctacaagtggatattcagacctctttgaggccttcgttggaaacgggatttctttatattatgctagacagaagaattctcagtaacttccttgtgttgtgtgtattcaactcacagagttgaacggttctttacacagagcagatttgagacactctttttgtggaatttgtaagtggagatttcagccgctttgaggtcagtggtagaaaaggaaatatcttcgtataaaaactagacagaatgattctcagaaactgctttgtgatgtgtgcgttcaactcacagagtttaaccttccttttcatagagcagttaggaaacactctgtttgtaaaatctgcaattggatattcagacctctttgaggccttcgttgcaaacgggatttctttatgttatgctacacagaagaattctcagtaactttcttgtgttgtgtgtattcaactcacagagttgaacgatcctttaaacagggcagattttaaacacactttttgtggaatttgcaagtggagattacagacgctttgtggtcaatggtagaaaaggaaataccttcgtataaaaacaagacagaaactcctttgtgatgtgtgcgttcaattcacagagtttaacctttcttttcatagagcagttaggaaacactctgtttgtaatgtctgcaagtggatattcggacctctttgaggccttcgttggaaacgggatttcttcatattatgctagaaagaagaattctcagtaacttctttgtgttgtgtgtatgcaactcacagagttcaaccttcctttagacagagcacatcggaaacactctttctgagggatttgcaagtggagatttcaagcgctttgattccaaaggcacaaaaggaaatattttcgcaaaaaactagacagaatcattctcagaaccggttctgtgatgtgtgcgttcaactcactgagcttaacttgtcttttcattcagcagtttggaaacactctgtttgtcaagtctgcaagtggatattcggacctctttgaggccttcgttggaaacgggatttcttcatattacactagacagaagaattctcagtaacttccttttgttgtgtgtattcaactgacagagttgaaccttcccttagacagagcagatttgaaacactctttttgtggggtttgcaagtggagatttaaagcgctttgaggccaaaggcagaaaaggaaatatcttcgtataaaaactagacagaatcattctcagaaactgctgtgtgatgtgtgctttcaactcagagagtttaacttttcttttcattcagcagtttggaaacactctgtttgtaaagtctgcaagtggatatattgacctcttagggtccttcgttggaaacgggttttttttcatgtaaggctagacagaagaattcccaataacttccttgtgttgtgtgcattcaactcacagagttgaacgttcttttagacagagcagatcggaaacaatctttttgtgcaatttgcaggtggagatttcaagcgctttaaggtcaatggcagaaaaagatatatatcttcatttcaaaactagacagaatcattccaaaaagtgcattgtgatgtgtgcgttcaactcacagagtttaacctttgttttcatataaccgattgtaaacgctctgattgtcaagtctgcaagtggatattccgacctttttgtggccttagttggaaacgggatttcttcataaaatactacacagaagaattatcagtaacttgcttgtcttgtgtgcattcaactcacagatttgaaagatcctttacacagagcagatttgaaacactctttttgtggaatttgtaagtggagatttcagccgctttgaggtcaatggcagaaaaggaaatatcttcgtataaaaactagacagaatgattctcagaaactgcgctgtgatgtgtgcgttcaactcacagagtttaacctttcttttcatagagccgtttggaaacactctgtttgtcaaggctgcaagtggatattctcacctctttgtggccttcgttgaaacgggatttcttcatataatgctagacagaagaattctcagtaacttccttctgttgtgtgtattcaactcacagatttgaaagatcctttacacagagcagatttgaaacactctttttgtggaatttgcaagtgcagatttcaagcgcttggaggccaattgtagaaaaggaaatatcttcgtataaaaacaagacaaaatcattcccagaaactgcgtagtgaggtgtgtgtttaactcacagagtttaacctttcgtttcatacagcattttggaaacactctgtttgtaaagtctgcaagtggatatttggatctcttagatgccttcgttggaaacgggatttcttcatataatgctacagggaagaattcttagtaacttctttgtgttgtgtgtattcaactgtcagatttgaaccttcatttagacagagcagatttgaaacactctttttgtggaatttgcaaatgcagatttcaagccctttgaggccaaacgcagaaaagcaaatatcttcgtataaaaactagactgaatcattctcagaaactgctctgtgctgtgtgcgttcaactcacagagtttaagttttcttttcattcagcagtttggaaacgctctgtttgtaacgtctgcaagtggatattttgacctctttgaggccttcgttggaaacgggatttcttcatataatgctagagggaagaattcttagtaacttcttcgtgttgtgtgtattcaactgtcagagttgaaccatcatttagacagagcagatttcaaacactctttttgtggaatttgcaaatgcagatttcaagtcctttgaggccaaacgcagaaaaggaaatatcttcgtataaaaactaggcagaatcattctcagagactgctctgtgctgtgtgcgttcaactcacagtgtttaagttttcttttcattcagcagtttggaaatgctctgtttgtaacgtctgcaagtggatattttgacctctttgaggccttcattggaaacggatttttttcaggtaaggctatacagaagaattcttattaacttccttgtgttgtgtgtattcaactctcagaattgaattttcttctagacacagcagatttaaaacactctttttgtgcaatttgcaagtggagatttcaagcgctttgattccaatagtagaaaagggaatatcttcgcataaaaactagacaaaatcattcccagaaactgcatagtgatgtgtgtgtttaactcacagagtttaacctttcttttcatacagcattttggaaacactctgtttgtaaattctgcaagtggatatttggacctctttgaggccttcgttcgaaacgggatttcttcatatactgctaaacaaaacaattctaagtcacttctttgtgttgtgtgtattcaactgacagagttaaaccttcctttagacagagcagatttgaaaccctccttctgtggaatttgcaagtggcgatttcaagcgctttaaggtcaatggcagaaaaggaaacatcttcgtttaaaaactagacaaaatcattcccagaaactgcgttgtgatgtgtgcgttcaactcaaaaagtttaacctttcttttcatagagccgtttggaaacactctgtttttgaagtctgcatgtggatattcggacctctttgaggccttcgttagaaacgggatttctttatattatgctagacaaaagaattctcactaacttctttgtgttgtgtgtgtgcaactcacagagttcaaccttcttttagacagagcagatttgaaatactctttttttggaattggcaactggaagtttcaagcgcttagaggccaatggtagaaaaggaaatatcttcgtataaaaacaagacaaaatcattctcagaaactccgtagtgatgtgggtgttttactcacagagtttaacctttcttttcatacagctttttggaaacactctgtttgtaaagtctggaagtggatatttggaccacttgtatgcctcctttggaaacgggatttcttcatataatgctggagagaagaattcttagtaacttcttcgtgttgtgtgtattcaactgacagatttgaaccttcctttagacagaggagatttaaaacactctttttgtggaatttgcaagtagagatttcaagcgctttgaggccaatggcagaaaaggaaatatcttcgtataaaaactagacagaatcattttcagaaactgctctgtgatgtgtgtgttcaactcagagagtttaacttttcttttcattccgcagtttggaaacactctgtttgtaaagtctgcaagtggatattttgacctctttgaggccttcgttggaaacgggtttttttcttgtaaggctagacagaagaattctcagtaacttccttgtgttgtgtgtattcaactcacggagttgaacgttcctttagagagagcagacttgaaactctctttttgtggaatttgcaagtggagatttcaagagctttgttgccaatggtagaaaaggaaatatcttcgcataaaaactagacaaaatcattcccagaaactgcgtagtgatgtgtgtgtttatctcccagagtttaacctttcttttcataccgcattctggaaacactctgtttgtaaagtctgcaagtggatatttggacctcttagatgccttcgttggaaatgggatttcttcatataatgctagacagaagatttctcagtaagttcttcatgttgtgtgtattcaactctcagatttgaacgttcctttagacacagcagatttgaaacactctatttgtggaatttgcaagtggagatttcaagcgctttgaggccaacggtaaaaaaggtaataaattcgtttaaaaactacacagaatcattcgcagaaactgcgttgtgctgtgtgcgttcaattcacagagtttaacctttcttttcattcaacagtttggaaacactctgtttgaaaagtcttcaagtggatatttggacctccttgaggcgttcgttggaaacgggatttcttcatatagggttagacagaagaattctctgtaatttccttttgttgtgtgtattcaactcacagaggtgaacgttcctttagacagacagatttgaaacactctttttgtggaatttgcaagtggagatttcagccgctgtgaggtcaatggtagaaaacgaaatgtcttcatataaaaactatacagaatgattctcagaaacttctttgtcatgtgtgagttgaactcacagagtttaacctttcttttcattcagcagtttggaaacactctgtttataaagtctgtaagtggatattttgacctctttgaggccttcgttttaaacgggtttttttcatgtaaggctagacagaagaattctcagtaacttccttgtgttgtgtgtattcaactcacagatttgaacgttcctttagacagaggagatttgaaacactctcattgcggaatttgcaagtgggatttcaagcgctttgaggccaacggtagaaaaggaaatatcttcgtttcaaaactagacagaatcattcccacaaactgcgttgtgatgtgtgcgttcacctcacggaccttaacctttcttttcatagagcagtttggaaacactctgtttgtaaactctgcaagtggatatttggacctattagacgccttcgttggtaacgtgatttcttcatataatgctaaacagaagaattgtcagtaacctccttttgttttgtggattcaacccacagagatgaacattcctttagacagagcagatttcaaacacactttttgtggaatttgcaagtggagatttcaagcgctttgaggccaattgtagaaaaggaaatatcttcgtataaaagctagacagaatgattcccagaaactgcgttgtgatgtgtgcgttcaagtcacagagtttaacttttcttttcattgagcagtttggaaacactctgtttgtaaagtctgcaagtggatatttggatctagtagaggccttcgttggaaacgtattttgttcatgtaacgctagacagaagaattctcagtaacttccttgtgttgtgtgtattcaactcgcagagttgaacggtcctttagacagagcagatttcagacactcattttgtggaatttgcaagtggagatttcaagcgctttaagctcaatggcagtaaaaggaatatcttcgttgaaaaaatagacagaatcattcccacatagtgcgttgttatgtgagcgttcaactcacagagtttaactattcttttcatagagcagttaggaaacactctgtttgtaaagtctgcaagtggatattttgacctctttgaggccttcgttggaaacgggtttttttcatgtaaggctagacagaagaattcttagtaacttccttgtgttgtgtgtgttcaactcacagagttgaacgtttctttagacagagcagatttgaaacactgtttttgtggaatttgcaagtggagatttcaagcgatttaaggtcaatggcagaaaaggaaatatcttcgtttcaaaactagacagaatcattcccggaaactgcgtagtgatgtgtgtgtttaactcacagagtttaacctttcttttcattctgcagtttggtaacactctgtttgaaaaatctgcaagtggatattttgacctccttgaggcgttcgttggaaacgggatttcttcatataaggcacgacagaagaattctcagtaacttccttgtgttgtgtgtattcaactcacagagttgaacgttcctttagacagagcagatttgaaacacgctttttgtggaatttgcaagtggagatttcaagcgatttaaggtcaatggcagaaaagggaatatcttcgtttaaaaactagacaggatcattcccacaaactgcgttatgatgtgtgcgttgaactcactttgtttaacctttcttttcatagagccatttggaaacactctgtttgtcaagtctgcatgtggatattcggtcctctttttggccctcgctggaaacgggatttcctcatataatgctagacagaagaattctcaataacttccttgtgttgtgtgtattcatatcacagttttgaacgttcctttagacagagcagatttgaaacactctttttgtggaatttgcaagtggagaattcagccgctttgaagacaatgttagaaaaggaaatatcttcgtagaaaaactagacagaatgattatcagaatctgcttggtgatgtgtgcgttcaactcacagactttaatctttcttttcatagagcagttaggcaacactctgtttgtaaagtctgcaagtggatattcggacctctttgaggccttcgttggaaacgggatttcttcatatagtggtagacgaaagaattcttagtaccttctttgtgttgtgtttatgcaactcaccgagttgaaccttcctttatacagagcagatttgaaacactctttttgtggaatttgtaagtggagatttcaagcgatttgaggccaatggtagaaaaggaaatatcttcatataaaactagaaagaatcattccccaaaactgcatggtggtgtgtgcgtcaactcacagttttacgtttgttttcatagagcagttgggaaacactctgtttgtaaagtcttcaagtggatatttttacctccttgagaccttcgttggaaacgggatttctttatataatgctagacagaggaattctcagtgacttccttttggtgtgtgcattcaactcacagagttgaaccttcctttagacagagcagatttgagacactctttttgtggaatctgcaagtggaaatttcaagagcttggaggccagtgttagaaaaggaaatatcttcgtataaaaactagacagaatcattcccagaaactgcgttgtgatgtgtgcatttaactcacagagtttaacctttcttttcattcagcagtttggaaacactctgtttgaaaattctgcaagtggatatttggacctccttgaggcgttcgttggaaacgggatttcttcatataaggctagacagaagaattctcagtaacttccttgtgttgtgtgtattcaactcacagagttgaaccctcctttagacagagcagatttgatacactctttttgtggaatttggaagtggagctttcagccgctttgaggccaactgtagaaaaggaaatatgttcgtataaaagctagacagaatcactcccagaaacttcgttgtgatgtgtgtgttcacctcacatagtttaacctttcttttcattgagcagtttggaaacactttgtttgtaaagtctgcaagtggatatttggacctagtagagcccttctttggaaacaagatttcttcatataatgctagagagaagaattctcagtaacttcattttgttgtgtgtattcaactcacagtggtgaactttcctttagacagagcagagttgaatcttccttttgatagagctgtttttactctttttattgaatatgcaagtggatatttggagtgctttggagccttcgttttaaaaggtaatatattcacataaaaactagacagaagcattctcagaagcttctttttgatatgtgcactcaactcacagagttgaacctgccttttgatagagcagttttgaaacgctcttttgttgtatctggaagtggatatttggagtgctttgaagccttcattggaaacgggaatatattctcattaaaactagacagaagcattctcagaaacttccttgtgatgtgtgcgttcaactcacagagttgaacctttgctttggtgtagaagttttgaaacactctttttgtagaatctgcagttggatatttgtagctctttgaagcctatggtagaaaaggaaatatctacacataaaaactagacagaagcattctcagaaacttctttgtgatgtgtgcttacaaatcccagaatttaaactttttttttgacagagcagttttgaaacactcttcttgtagtatttgcaagtggataattggattaccttgaagccttggtggaaatggaaatattttccaataaaatctagacagaagcattgtcaaaaactcctttgtgacgtgtacattcaactcacagaattttacatatctcttaacagagcagttttgaaacccactttttgtagaatctgcaagtggatatttggagcaatttgtgggtatggtggaaaaggaaataccttcacataataactagacagaagctttcagaaacttctttgtgatatgtgcattcaattcacagagttgaacctttcctttgatagagcagttttgaaacactctttttgatgaatctgtaattggatatttggagtgcattgtggcctatggtagaaaaggaaatatcttcacataaaaactagacagaaaaattctcaaaaacctctttctgatgtttgcattcaactcacagagttaaaaatttcttttgatagagcagttttgaaacactctttttgcagaatctgcaagtggatatttggacagctttgaggcctttgttttatttttatttttatttttttaaatgaaaaatatttatttattataaacctattttgtttgtttgttttttattatactttaagttttagggtacatgtgcacattgtgcaggttagttacatatgtatacatgtgccatgctggtgcactgcacccactaactagttatctagcattaggtatgtctcccaatgctatccctctcccctcccccaaccccaccacagtccccagagtgtgatattccccttcctatgtccatgtgatctcattgttcaattcccacctatgagtgagaatatgcagtgtttgatttttttgttcttgctatagtttactgagaatgatgatttccaatttcatccatgtccctacaaaggacatgaactcatcattttttatggctgcatagtattccatggtgtatatgtgccacattttcttcatccagtctataattgttggacatttgggttggttccaagtctttgctattgtgaataatgccgcaataaacatacgtgtgcatgtgtctttatagcagcatgatttatagtcatttgggtatatacccagtaatgggatggctgggtcaaatggtatttctagttctagatccctgaggaatcgccacactgacttccacaatggttgaactagtttacagtcccaccaacagtgtaaaagtgttcctatttctccacatcctctccagcacctgttgtttcctgactttttaatgattgccattctaactggtgtgagatggtatcttattgtggttttgatttgcatttctctgttggccagtgatgatgagcattttttcatgtgttttttggatgcataaatgtcttcttttgagaagtgtcttttcatgtccttcacccactttttgatggggttgtttgtttttttcttgtacatttgtctgagttcattgtagattctgtatattagccctttgtcagatgagtaggttgcgaaaattttctcccattttgcagttttgaaacaatctttttgtacaatctgaaagtggataattcgagtacttagaagccttctttggaaacgggaatatcttcacataaaaattagacagatgcattttcagaaactactttgtgatggtagcattcaactcagagagttgaaacctccttttgatagatctgttttgaaaggctctttttgtagaatctgcaagtggatatttggagcgctttgaggcctgtggtagaaaaggaaatatcttcataaaaaaaatagacagacgtattctcagaaactacttcatgatgtgtgcattcaacacagagactttaacctttcttttgatagaggaactttgaaacactctttttatagaatctgcaaagggacatttggagcactttgacggataccgtggaaaaggaaatatcttcacataaaaacgagtcagaagtgttctcagaaacttctttgtgttgtttgcattcaactcacagagttgaaactttcttttcattgagcagttttgaaacactctttttgtagaatccgcaagtggatatttggactgctttgaggccttcattgtaaatgggaatatcttcacataaaaactagacagaagcattctcagaaacttctttgtgatgtgggcattcacctcaaagtgttgaaccttcttttgatacagcagttttgaaaaactctttttgtggtatctgcaagtggatatttggagcgtgttgaggccttcgtttgaaacgagaatatcttcacataaaaaccagacagaagcattatcagaaacttctttgtgatgtgtccattcaactctcagagttgaaccttccttttgatagagcagttttgaaatactttttttgaaggacatgcaagtgtatatttggagtgttttgaagccttcattggaaacaggaatatcttcacataaaaactagatggaagcattctccaaaacttctttgtgatgtgtgcattggtagagcagatttgaaacactctttttggagaatctgcaagaggatatttggagccctttaaagcctatggtagaaaaggaaatttctttatacaaaaactggaaagaagaattctcagaaattagtttttgatgtgtacattcaactcacaaattttaagctttcttttgatacagcagttttgaaacactctttttatagaatctgcaagtggatatttggactactttgagaccttcgtcggaaacgggaatatctttacataaaaactagacagaggcattctcagaaaatactttgtgaagtgtgtattcaactcacagagttgaactttccttatgatagtgcagttttgaaacacactttttgtagaatctgcagttggatatttggactgctttgaagccttctttggaaatgggaatatcttcacataaaaactaggcagaagcattctcagaaacttcattgagatgtgtgcattcaactcacagagttcaaccccactttggatagagcagttttgaaacactctttttgtagaatctgcaagtggatatttggaatcttcagaagcctatggtggaaaaggaaatgtcttcatataaaaactagaaagaaacattctcagaaactacttagtgatgtgtgcttacaactcacagaatttaacctttcttttgaaagagcagttttgaaacactcttcttgcagaatgtgctagtggataattggagtgctttgaaggctttgttggaaacgggaatatcgtcacaagaaaaatagacagaagcattctcaaaaactgcattgtgatgtgggcattcatctcacagagttaaacttatctttttacagaacagttttgaaacactctttttgtagtatctgccattggatatttgggacgctttgaagcctttcttggaaacgggaatatattcacaaaaaactagacagaagcattctcagaaacttccttgtgatgtgtgtattcaactcacagagttgaacgttctttttgaaagatcagttttgaaacactccttttgtagtatctgcaagtggattattggagtactttgaagtcttcattggaaacgggtatatcttcacataaaaactagaagatgcattctcacaaacttcattgtgatgtgtccattcaagtcacagagctgcaccttccttttcatagagcagttttgaaagagtctttttgtagtatctgcaagtggatacttgtagtggtttcaagccttcaatggaaacgggaatatctccaaataaaaaaaagacagaagcattctcaggaacttccttgtgatgtgtgcattcaactcacagagttgaacctgccttttattagagcagttttgaaacactctttttgtagaatctgcaagttgatcattggggtactttgaagtcttcgttggacacgtgtatatcctcacatgaaaactagacagaagtattctcagaaacttcttttagatatgtgcatttacctcatagagttgaaccttccttttgatagagcagttttgaaacgctctttttgtagtatctgcaagtggatatttggagtgctttaagccttcatcggaaacgggaatatattcacataaaaactagagagaagcattctcaaaaacttccttgtgatgtgtgcattcaactcacagagttgaatcttccttttgatagagccgttttgaaacactctttttgtaaaatctgcatgtggataattggagtgctttgaagtcttcgatgaaaacgggtatatcttcacataaaaactagaaagatgcattctcagaaacttctttgtgatgtgtccattcaactcacagagctgaaccttcctttagatagagcaattttgaaagagtctttttgtagtatctgcaagtgggtatttttagtggtttgaagcctttgttggaaaagtgaatagctcaaaataaaaactagacagaagcattctcagtaacttccttctgatgtgtgcattcaactcacagagttgaaccttccttttgatagagcagttctgaaacactctttttgtagcatctgcacgtggataattggagtaatttgcagtcttcgttggaaacgggaatatattcacataaaaactagacagatgccttctcagaaacttctttgtgatgtgtccattcaactcacagagctgaaccttccttttgatagagcagttttgaaagagtatttttgtagtgtctgcaagtggatatttggagtgctttaagccttcattggaaacgggaatatattcacataaaaactagacagaagcattctcagaaacttccttgtgatgtgttcattcaatgcacagagttgaatcttccttttgatagagcagttttgaaacactctttttgtagaatctgcaagtgcatcattggtgtactttgaagtcttcgatgaaaacgggtatatcttcacataaaaactagacagatgcattctcagaaacttctttgtgatgtgtccattcaactcacagagctgatccttccttttgatagagcagttttaacttacaagggatgtgaaggacctcttcaaggagaactacaaaccactgctcaaggaaataaaagatgatacaaacaaatggaagaacattccatgctcatggttaggaagaatcaatatcgtgaaaatggccatactgtccaaggtaatttacagattcaatgccatccccatcaagctaccaatgactttcttcacagaattggaaaaaactactttaaagtgcatatggaaccaaaaaagaacccacatcgccaagtcaatcctaagacaaaagaacaaaggtggaggcatcacactacctgacttcaaactatactacaaggctacagtaaccaaaacagcatggtactggtaccaaaacagagatatagatcaatggaacagaacagagccctcagaaataatgccacatatctacaactatctgatctttgacaaacctgagaaaaacaagcaatggggaaaggattccatatttaataaatggtgctgggaaaactggctagccatatgtagaaagctgaaactggatccgttccttacaccttatacaaaaatcaattcaagatggattaaagagttaaatgttagacctaaaaccataaaaaccctagaagaaaacctaggcaataccattcaggacatagacatgggcagggacttcatgtcgaaaacaccaaaagcaatggcaacaaaagataaaattgacaaacgggatctaattaaacaaaagagcttctgtacagcaaaagaaactaccatcagagtgaacaggcaacctacaaaatgggagaaaacttttgcaacctactcatctgacaaagggctaatatccagaatctacaatgaactcagacaaatttacaagaaaaaaaacaaacaaccccatcaaaaaatgggccaaggacttgaacagacacttctcaaaagaagacatttatgcagccaaaaaacacatgaaaaaatgctcatcatcactggccgtcagagaaatgcaaatcaaaaccacaatgagatactacctcacaccagttagaatggcaatcattaaaatgtcaggaaacaacaggtgctggagaggatgtggagaaatagcaacacttttacactgttggtgggactgtaaactagttcaacctttgtggaagtcagtgtggcgattcctcagggatctagaactagaaataccatttgacccagccatcccattcctgggtatatacccaaaggactataaatcatgctgctataaagacacatgcacacatatgtttattgcggcactattcacaatagcaaagacttggaaccaacccaaatgtccaacaatgatagactggattaagaaaatgtggcacttatacaccatggaatactatgcagccataaaaaatgatgagttcatgtcctttatagggacatggatgaaactggaaatcatcattctcagtaaactatcacaagaacacaaaaccaaacaccgcataatctcactcataggtgggaattgaacaatgagatcacatgggcacaggaaagggaacatcacactctggggactgttgtggggtgcggggagcggggagggatagcattgggagatatacctaatgctagatgactagttagtgggtgcagtgcaccagcatggcacatgtatacatatgtaactatcctgcacaatgagcacgtgtaccctaaaacttaaagtataataatacaagaaaaattaaaaaaaaatccggtaaactaaatgttcacagtgacaattataatagtctaaaagtggaaagaaaccaaatgttcatctattgataaatggttaaacaaaatgtggtatatacatatggaatgtcattttccacaaaaaggaagtgctattgcatgctataacatggatgaacgttgtaaacattatgctaaataaaagaaaccaaatacaaaaggccacatattgtatgattcaagttatatgaaatgtccagaataggcaaaatcatagaaacagatagcaaatttgaggtgccaagggttagaggattggggaattggaggtgactgctgtcagttatgagatttctttttgtggtgatggaaatgttccagaattaggtcatgatgattaacataacactgtgactatactaaaaaaacattaacctgtaaacttgaaaatggtgacttgtatgttatgtgaataatacctaaataattaaaagaagtaaggataataaaatcatcttaatcagccagctatgctagagcaagtaaagctaaatatctttttaggatctagagaaaataaaattataaaattatcatacataaagacaattaatgagtatgcagcaaaaaactattacaaagatgggtcatgcaattctataatttgtaaatgttatttttatcaactgagtggtatatttcaaaaatttaaagcatttttaagtttataattcattgtgtttgttttttcactccaaataaatacctactgtcatgactaaaaaaaaaaaagaaagagtctttttgtagtatctgtaagtggatatttgtagtggtttgaagccttcgttggaaaagggaatatctccaaatgaaaactagacagaagcattctcagaaacttccttgtgatgtgtgcattcaactcacagagttgaaccttccttttgatagagcagttctgaaacactctttttgtagcatctgcacgtggacaattggagtaatttgtagtcttcgttggaaacgggaatatcttcacataaaaactagacagatgccttctcagaaacttctttgtggtgtgtccattcaactcacagagctgaaccttccttttgatagagcagttttgaaagagtctttttgtagtgtctgcaagtggatatttgtattggtttgaagccttggttggaaaagggaatatctccaaataaaaactagacagaagcattctcagaaacttccttgtgatgtgtgcattcaactcacagaattgaaccttccatttgatagagcagttctgaaactctctttttgtagcatctgcacgtggataactggagtactttgatgtcttcattggaaatgggtatatcttcacataaaaaatagaagcattctcaaaaactactttgtgatgtgtgcattcaactcacagatttgaaccttccttttgatagaacagttttgaaacactctttttgtagattctgcaattggatattgggagtgctctgaagtcttcgttggaaacgggaatttctccacataaaaactagacaaaagcattctcagaatcttctttgagttgtttgcattcaactcacagagttgaaactttcttttgatggagcagttttgaaacactctttttgtagaatatgcaagtggatattttgtctgctctgaggaattcgttggaaacgggaatatcttcaaacaaaaactagacagaagcattctcagaaactgctttgtgatgtgtgtgttgaactcacagcgtttaaacttccttttcatagagaagttttgaaacactcttttgtagaatatgaaagtggatatttggagtgctttgaagccttcattggaaaggggaatatcttcacataaaaactagacagaaggattctcagaaacttccttgtgctgtgtgcattccacttacagatttgatccctccttttgaaagaacagttttgaaacattctttttgtagaatctgcagttggatatttggaaccctttgaggcctacggtagaaagggcaatatcttcatataaaaactagaaaaaaaacattctcagaaactactttgtgatgtgtgcattcaagtcacagagtttaacctttcttttgatagagcagttttgaaaaactctttttgtagaatctgtaagtggacatttggagcactttgagggttactgtggaaaaggaaataccttcacataaaaactagacagaagcattctcagaaacttctttgtgatgtttgcattcaactcacagtgttgaacctttcttttcatagagctgttgtgaaacacactttttgtataatctgcaagtggatatttggactgctttgagtccttcattgggaacggaaatatcttcacataaaaactagactgaagaattctgaggaaattctttgtgatgtgtacattcacctcacatagttgaaactttcttttgataaaacagttttgaaactgtttttgcagaatctgcaattggatatttggagtgctttgaggcctatgttagaaaaggaaataccttcatataaaaactagacagaagcattctcagaaactactttgtgatgtgtgcttacaactcgcagaatttaacctttcttttgatatgcagttttgaaacactctttttgaagaatctgcaaggggataatttgagtgctttgaagccttccttgcaaacgggattatcttcacataaaaattagacagaagtattctcaaaaactacattgtgatgtgggcattcatctcacagagtttaaccattcttttgatagggaagttttgaaacactgtttttgtagaatttgcaagttgatagttggaccactgtgaggccttcattggaaaggggaatatcttcacataaaaactacacagaagcattctcagaaacttctttgtggtatgtgcattcaacacacagagctgagtcctccttttcatagagcagttttgaaacactctttttatagtatccgcaagtggatatttcagtgcttggaagccttctttggaaactggaatataataacataaaaagtagacagaagcattgccagaaacttccttgtgatgtgtgcattcaactcacagattttaactttcttttgatagagcagttttgaaacactttttttgtagaatctgcaagtggatattctgactgcttgtaggcattccctagaaacaggtatatcttcacaaaaaaactagacagaagcattctcagaaacttctttgtgatgtttgcattcacctcacagatttgaacctttcttttcatagagcagttttgaaacactcttttggtagtatctgcatgtggatatttggacttcattgaggcctttgttagaaacgggattatcttcacataaaaactagacagaagcattctcagaaacttctttttgatgtgtgcattcaactcactgagttgaaactttcttttgttagagcagttttgaaacactctttttgtagaatctgccattggatatttggagcactttgaggcctatcatagaaaaggaaatagcttcatgtaaaaacaagacagaagcattctcagaaactacttcatgatgtgtgcttacaactcacagaatttaaactttcctttgatagagcagttatgaaaaactctttttgtagaatctgcaagtgggtaattggagtgctttgaagccttcagtgggaacgggaatatcttcacataaaaaaaagacagaagcattctcagaaactactttgtcatgtgattttgaactcacagagttgaaccttccttttgatagagatgttttgaaacactctttttgaaaaatctgcaagtggataattggagtgctttgaagccttcgttggaaatgggaatatcttcacataaaaaccagacagaagcattcttagaaactctttgggatgtgtgtagtcaactcacagagtttaacttatcttttgatagagcagttttgacacatgctttttgtaaaatctacaagtggacatttggagcactttgagcactatggtggaaaaggaaatatcttaacataaaatagacagaagcattctcagaaacttctttgtgatatgtgcattcaacactcagagttgaacctttctttcaatagagtacttctgacacactctttttgttgaatctgcaagtggacatttggggcactttgagggctatgttgaagaaagaaatatcttcacataaaaactagacagaagcattctcagaaacttctttcggtcgtttgcattcaactcagagatttgaacctttcttttgatagagcagttttgaaacactcttttagtagaatcagcacatggatagtttgagtgcttagaatacttcgttggaaaagggaacagcttcacataaaaactagacagaaggattctcagaggctactttgtgatgggtgtgttcaactcagagagttgaacattcctttttgtgcagcagattttaaacactctttttgtagaatctgcaataggatattttcagcctgttgaggcctctggtaggaaaggaaattactttatataaaaactagaagaaagaaatctcagaagctagtttttgatgtgtgcattcaactcacagattttaacctttcttttgatagagcagttttgaaacactctttttgtagaatctgcaagtggatatttttacagctttgaggaattcgttagaaacgggaatatcttcacataaaaactagacaaaagcattctcacaaacttctttgtgatgtttacattcagctcacagtgttgaacttttcttttcatagagcagttttgaagcactctttttgtagtatctgcaagtggatatttggacttttttgaggccttcattggaaacgggaatatctacacataaaaactagacagaagcattctcagaaacttctttgagatgtgtgcattcaactcacagaattgcacctttcttttgatagggcagttttgaaacactctttttgtagaatttgaaattggatatttggagcgctttgaggcctaagttagagaaggaaatatcttcatataaaaactagaccgaagcattctcagaaacaactttgtgatgtgtgcttacaattcacaatataaaacgtttttttttttttttgatatagcatttttgaaacactctttttgtagaatctgcaactggataattggagttctttgaagccttctttggaaacgagaagatcttcacataaaaactagacagaagcattctcaaaaactacattgtggtgtgcgcattcaactcacggagtttaacctatcttttgacagagcagttttgaaacactcttttgtagaatctgcaagtcgacatttggagcactttgagggctatggtggaaaagtaaatatcttcacataaaaactagacagaagcattctcagaaacttctttgtgatgtttgtattgaacccagagagttgaaaatttcttttcacagagcatttttgaagtactctttttgtagaatatgcaaggggatatttgggctgattaggggccttcattggaaacgggaatatcttcacataaaaactagacagaagcattctcagaaacttctttgtgatgtgtgcattcaacacacagagtttaaccattctttttatagagcagtttgaaccactctttttgtagaatctgcagtggacatttgaagcactttgagggctatggtggaaaaagtaatatcttcacaaaaaaactagacaggagcattctcagaaacttctttgtgatgtttgcattcaactcacagagttgaacctttcttttgatagagtagttttgtaactctcgttttgtagaatctgcaagtggatatttggacttctttgagagcttcgtaggaaatgggaatatacaaacagagagaagcattctcaaaaactactttgtgatgtgtgcattcaactcaccgaatttaacctgtcatttgacagagcagatttgaaacactctttttgtagaatctgcaagtggacatttggggcactttgagggctatggtggagatggaaatatcttcacataaaaactagacagaagtattctcagaaactgctttgagatgtttgcattcaactcagagagtcgaacatttcttttgatagagcagctttgaaacattttttttttagaatctgcaagtggatatttggacagctttgaagccttggttggaaacggtaatatcttcccataaaaactagatagaagcattctcagaaacttttttgtaatacgttcattcaactcaaagagttgaaccttccttttgatagagcagttttgaaacattctttttgtagaatctgcaagtggataattggagtacattgaagtcttcattggaaacggatttatcttcacataaaaactacacagatgcattctcagaaacttctctggcacgcgtacattcaactcacagcgttgaacctttctttttatagagcagttttgaaacactctttttgtaaaatctgcaagtagttatttggagtggtttgaagccttccttggaaatgggaatatctccacataaaaaccagacagaagcattctcagaaacatctttgtgatgtgtgcattcaactcacagagttgaaccttccttttgatagagcagttttgaaacactctttttgtagaatctgcaagtggatatttagaaacatttgacgccttcattggaaaagggaatatcttcacataaaaactagacagaaggattctcagaaactactttatgtgtgcattcaactcacagatttgaaccctccttttggtagagtagatttgaaacactgtttttgtagaatctccaagtgggtatttgtagccctctgaggcctctggtagaaaaggcaatttctttatatgaaaattagaacaaagcattctcagaaactagtttgtgatgtgtgcttttaactcacagagtttaacttttcttttgatagaacagttttgaaacactctttctgtagaatctgcaagtggatattttgactgctttgaggaattcattggaaacgagaaaaacttcatataaaaactagacagaagcattctcagaaacttctttgtgatatttgcattcaactcacagagtaaaacctttcttttcatagagcagttttgaaatattctttttgtagaatctgcaattggatacttggagaggtttgaggcctatggtagaaaaggaaatatcttcatataaaaactagacagaagcattctcagaaactacttcgtaatgtgtgcttacaactcacagaatttaacctttcttttgatagaggagttttgaaacactgttttggtagaatctgcaagtggataattagagtgctttgaagctttgttggaagagggaatatcttcacataaaaactagacagaagcattctcaaaaactactttctggtgtatgcattcaactcacagagtttaacctatcttttgacagaacagttttcaaacactgtttttgtagaatccgcaagtggacattttgagcactttttgggctatggtggaaaaggaatatcttcacataaaatcagactgaagcattctcaaaaacttctctgcgatgtttgcattcaacacagagagttgaatatttcttttgatagagcaattttgaaacactttttttggagaatctgcaagtcgatatttgttctgctttgaggccttcattggaaacgggaatatcttcacataaaaactagacagaagcattctcaaaaactacattgtcctgtgtgcattcaactcgcagagattaacatatcttttgacagagcagttttgaaacactctttttgtagaaactgtaagtggacaatttgatcactttgagagctatggtggaaaaaataatatcttcacaaaaaaactagacagaagcattttcagaaacttctttgtgatgtttgctttcaactcactgagttgaaactttcttttcatagaacagttttgaaacactctttttgtggaatctgaaagtggatatttggaccgctttgaggccttcgtaggaaacgggaatatcttcacataaaaactagacagaagcattctcagaaacttctttgtgatgtgtgcattcaactcacagagttgaacttaccttatgatagagcggttttgaaaccctctttttgtagaatctgcaagtggatatttggactcctttgaggccttcataggaaacggaaaaatcttcacataaaaactagacagaagcattctcagaaacgtctttgtgatgtgtgcattcaactcccagagttgaaccttccttttgatagaatctgaaagtggatatttggagtgctttgaagccttcgttgaaaacgggaatatcttaacataaaaaccagacagaagcattctcagaaacttctttgggatgtgtgcattcaactcacagagttgaacatttcttctgatagagctgttttgaaacactctttttgtagaatttgtgagtggatatttggagtgctttgaagcctttgttggaaacgggaataactccacataaaaactagacagaagcattctcagaaacttctttgagatgtgtgacttcaactcacagagtttcacctttctcttgatagagcagttttgaaaccctttttttgtacaatctgcaagtggaaaattggagtgctttgaagctttcgttggaaaggtgtatatcttcacataaaaactagacagaaatattctcagaaacttctttgtgatgcgtgcattcaactcacagagttaaacctttttttgatagagcagttttgaaacaaactttttgtagaatctgcaagtggacatttggagcactttgagggctctggtggaaaaagaaatatcttcacataaaaactagacagatccattttcagaaacttctttgtgatgtctgcattcaactcacagagttgaacctttcttttgatagagcaatttttaaacactctttttgtaggatctgcaagtggacatttggagcactttttgggctatgttggaaaaggtaatattttcacataaaaactagagagaagcattctcagaaacttctttgtgatgttgcattcaactcagagagttgaacatttgttttgatatagcagttttgaaactctctttttgtagaacctgcaagtggacatttggaccgcgttgaggccttcgttggaaacgggaatatcttcacataaaaattaaacagaagcattctcagaagctactttgtgatgtgtgcattcaactcaccaagttgaacattccttttgttagagcagatttgaaacactctttttgtagaatatgcatgtggatatttggagtgctttgaagccttctttggaaacgggaatatcctcacttaagaactagacagaagcattctcagaaacttccttttgatgtgtgcgttcaactcacagagttgaaccttcgttttgatagagcagttttgaagcactcgttttatagaatatgcacgtgggcatttggagcactttgagggctacggtttaaaagaaaacaccttcacaagaaaacttgacagaagcattctcagaaacttcgtcaggatgtttgcattcaagtcatggagttgatactttcttttcatagaacagttttgaaacactgtttttgtagaatctgcaagtggatatttagactgctttgagaccttcttcggaaacgctaatatcttcacataactagacagaagcattctcagaaacttctttctgaagcgtgaattcaactcacagaattgaacttttcttttgataaagcagtttggaaacactatttttgtagaatctgcaattggatatttggagcgctttaaggcttatggtagaagaggagatatcttcatataaaaattacacagaagcattctcagaaactacttagtgctgcgtacctaaaactcacagaatttaacctttcttttgatagagcagttttgaaacaccctttatgtagaatctgcaagtggataattgtagtgatttgaagcattcgttggaaatgggaatatcttcacaaaaactagacagaagcattctcaaaaactactttgtgaggtgggcattcaactcccagagtttaacatatcttttgacagagcagtttgaaacactctttttgtagaatcagcaagtggacttttggagcactttgagggctgtggtgaaaaaaagaaaaaaatcttcacataaaaattagacagaagcattctcagaaacttctttgagatgtttgcattcaactcagagagtcgaacatttcttttgatagagcagttttgaaacactcagtttgtagaagctgcaagtggatatttgcaccactttgaggccttcgttagaaacgggaatatcctcacataaaaactagatagaagaattctcagaaacttctttgtgatatgtgcattcaacccactgagttgaaccttccttttgatagagcagttttgaaacactctttttgtagtatctgcagttcgatatttggagtgctttgaaccctttgttggaaacgggaatatgttcacataaaaactagacagaagcattgtcagaaacttccttgtgatgtgtgcattaaactcatagagttcaacctttcttttgatagagcagttttgaaacactgtttttgtagaatctgcaagtggataaatggagtattttgaggtcttcgttggaaacggttgtatcttcacattaaagctagacagatgcattctcagaaacttctttgtgatgtgtgcatttaactcacagagttgaagctttcttctgataaagcagttttgaaacagtctttttgtaggatctgtaagtggatatttggagtggcttgaagccttcgttggaaacgggagtatctccacataaaaactagacagaagcatactccgaaacttctttgtgatgtttgcattcaactcacatagttgaaactttcttttcatagagcagatttgatacactctttttcagattctgcaagtggatatttggactgccttgaagccttcgtttgaaacgggaatatcttcacataaaaactagacagaagcattctcagaaacttctttgtgatgtgttcattctactcacagagttgaagctttctttcaatagagcaattttgaaacacactttttttagaatctgcaattggatatttggagcgctctgagccctatggtagaaaagcaaatatcttcatacaaaaactagacagaagcattctcagaaactactttgtgatgggtgcttacaactcacagaatttaaccgttcttttgacagagcagttttgaaacactctttttgtagaatctgcaactggatatttggactgccttgaggtctttgttggaaacgggaatatcttcacataaaaactagacagaaacattctcagaaacttccttgtgatgtgtgcattcaactcacagagatgaaacttccttttgatagagtagttttgaaacactttctttgtagaacctgcaagcggataattggagtactttgaaatcttctttggaaatggctatatattcacataaaaactagaccgttgcattctcaggaacttctttgtggatgtgtgcattcaacttaccgatttggagcttccttttgataaagcagttttgaaacactctttttgtacagtctgcaaatttatgtttggagcgctttgaggccagtggtagaaaatgaaatatcttcatataaaaactagatagaagcattctcagaaactactttgtgatgtgtgccttcaactcacagagtttcacccttctcttgatagagcacttttcaaaacctctttttgtagaatctgctagtggagaattggagtgctttgaaggcttcattggaaacaggtatatcttcacatataaactagacggaaacattctcagagaattctttgtgatgcgtgcattcaactcacagagttaagccttttttttaatagagcagttttgaaacacactttttgtagaatctgcaagtggaaatttggagcactttgagggctatggtgcaaacggaaacaccttcacaaaaaaactagacagaagcattctcagaaacttcttcacgatgtttgcattcaagtcacagcgttgaaactttcttttcatagagcagttttgaaacactcttgttgtagaatctgcaagagtacatttggagtactttgaaggatacagtggaaaaggaaatatcttcatataaaaactagactgaagcattctcagaaacttctctgtgatgtttgcattcaactcagagagttaaacatttcttttgatagagcagttttgaaacactgtttttgcagaatctgcaagtcgatatttggacggttttgaggccttcgttgataacggtgtatcttcacataaaaactagacagaagcattgtcagaaacttctttgtgatatgtgcattcaactcacagagttgaacgttctttttcatagagcagttttgaaaccctcttggatatttggagtgctttgaagccttcgctgggagcgcgaatatattcacataaaaactagacaaaagcattctcaaaaacttccttgtgatgtgtgtattcaactcacaaaactgaaccttccttttgatacaagagttttgaaacactctttttgagaatatgcacgtggataatttgactacttggaagccttcgttggaaacgggaatttcttcacgtaaaaactagacagatgcattctgagaatttccttgtgatgtgtgcattcaactcacagagttgaaccttccttttgatagagcagttttgaaaccctctttttgtagaatatgaaaatggataattggagttctttgtagtcttcattggaaacgggaatattttcacataaaaactagacagaagcattctcagaaacttctttgcaatgtgtgcattcacctcacagagttgagccttcctttgatagagcagatttgaaacactctttttgtagaatctgcaggtggatatttggagtgctttaaagccttctttggaaacggtaatatcttcacataaaaactagacagaagtattctcaaaaacttctttgtgatgtgtgcattcaactcacacagttgaaccctccttttgctactgcagatttgaaacactctttttgtagaatctgcaagtggatatttgaagccatttcaggcctctggtagaaaaggtaatttctttatctaaaaactagaaagaagcagtctcagaaaccagctagtgatgtgtgcattcagctcagagatttttaacctctcttttgctagagcagttttgaaacactctttttgtagaatctgcaagtggacatttggagcactttaagggctatgttggaaaaggaaataccttcacataaaaactagacagaaacattctcagaaacttctttgtgatgttcacattcacctcacagatatgaaccattgtggaagtcagtgtggtgattcctcatggatctagacctagaaatgccatttgacccagccatcccattactgggtatatacccaaaggactataaatcatgctgctataaagacacatgcacacatatgtttattgtggcattattcacaatagcaaagacttggaaccaacccaaatgtccaacaatgatagactggattaagaaaatgtggcacatatacaccatggaatactatgcagccataaaaaatgatgagttcatttcctttgtagggacatggatgaaattggaaatcatcattctcagtaaactatcataagaacaaaaaaccaaacaccgcatattctcactcagaggtgggaattgaacaatgagatcacatggacacaggaaggggaacatcacattgtgtggacagttgtggggtgcgggaaagggggagggatagcattgggagatatacctaatgctagatgactagttagtgggtgcagcacaccagcatggcacatgtatacgtatgtaactaacctgcacattgtgcacatgtaccctaaaacttaaagtataatcataaaaaaatgaatttttcttttcataaagcagttttgaatcactctttttgtagaatctgcaagtggatatttggattgctttgaggctttcgttggaaacgggaatatcttcacataaaaactagacagaaagattctcagaaacttctttgtgatatgtgcactcaacacagagagttgatcctttcttttgaaagagccattttgacacacactttttgtagattctacaattggacatttagagtactttctgggctatagtgcaaaaagaaatatcttcacatgaaaagtagacagaagcattctcagaagcttctttgtgatgtgtgcattcaactcacagagtttaaccttccttttgattgagcagttttgaaacattctctttgtagaatctgcaagtggttattaggactactttgaggccttcattggaaatgggaatatcttcacataaaaactataaataagcattctcagaaagttatttgtgaattgtgcattcaactcacagaattgaaccttccttttgatagagcagttttgaaacactctttttttatagtatctgcaagtggatatttggagtgttttgaagccttcgttggaaacgggaatatattcacataaaaactagacagaagcattctcagaaactttcctgtgatgtgtgtattcaatgcacagagttgaaccttccttttgatagagcagttttgagacactctgtttgtagaatatgctagtttatatttggagtgctttgaagccttcgttggaaatgtgaatatcttcacattaaaaactagacagaaggattctcagaaactactttgtgatgtgtgcattcaactcacacagttgaaccctccttttgctactgcagatttgaaacactctttttgtagaatctgcaagtggatatttgaagccatttcaggcctctggtagaaaaggcaatttctttatctaataactagaaagaagcagtctcagaaaccagctagtgatgtgtgcattcagctcagagatttttaacctctcttttgctagagcagttttgaaacactctttttgtagaatctgcaagtggacatttggagcactttgagggctatgttggaaaaggaaatattttcacataaaaactagacagaaacattctcagaaacttctttgcgatgttcacattcacctcacagatatgaaccattgtggaagtcagtgtggtgattcctcaaggatctagacctagaaatgccatttgacccagtcatcccattactgggtatatacccaaaggactataaatcatgctgctataaagacacatgcacacatatatttattgtgacattattcacaatagcaaagacttggaaccaacccaaatgtccaacaatgatagactggattaagaaaatgtggcacatatacaccatggaatactatgcagccataaaaaatgatgagttcatttcctttgtagggacatggatgaaattggaaatcatcattctcattaaactattgcaagaacaaaaaaccaaacaccgcatattctcactcagaggtgggaattgaacaatgagatcacatggacacaggaaggggaatatcacactctgggaactgttgtggggtgcgaggaggggggaaggatagcattgggagatatacctaatgctagatgactagttagtgggtgccgcgcaccagcatggcacatgtatacatatgtaactaacctgcacaatgtgcacatgtaccctaaaatttaaagtataatcataaaaaaaatgaatttttcttttcataaagcagttttgaaacactctttttgtagaatctgcaagtggatatttggattgctttgaggccttcattggaaacgggaatatcttcacataaaaactagacagaaagtttctcagaaacttctttgggatgtgtgcattcaacacacagagttgatcctttctattgaaagagccattttgacatacactttttgtagactctactagtggacatttggagtactttctggactatagtgaataaataaatatcttcacatgaaaagtagacagaagcattctcagaagcttctttgtgatgtgtgcattcaactcacagagtttaaccttccttttgattgagcagttttgaaacactcttttgtagaatctgcaagtggatatttggactgatttgaggccttcgttggaaacgggaatatcttcatctaaacactagacggaagcattctcagaaactactttgtgatgtgtccattcaactcacagtgttgaacctttatttttacagagcagctttgaaacacactttttgtagaatctacaagtggatatttggactgcttggaggccttcattggaaacgggaatatcttcacataaacactagacagaagcattctcagaaactactttgtgatgtgtgcattgaaccccctagttgaaccttgctgttgatggagaagttttgagtcaatctttttctataatatgcaagtgtatattcggagtgttttgaagtcttcattggaaacgggaatatcttcacatgagaactagacgaaagcattctcagaaacttctttgtgatgtgtgcattaaactcacagagttgaaatttccttttgattgagcagttttgaagcactctttttgtagaatctgcaagtggatatttggactgatttgaggccttcgttggaaacgggaatatcttcgtctaaaaactagacagaagccttctcagaaactactttgtgatgtgaccattcaactcacagagtcgaacatttcttttgatagggcagctttgaaacacactttttgtagaagctgcaagtggatatttggactgctttgaggccttcattggaaacggaaatatcttcacataaaaactagacaaaagcattctcagaaactactttgtgatgtgtccattgaactcccctagttgaaccttgcttttgatggagaagttttgaatcactctttttgtagaatatgcaaatggatatttggagtgttctgaagccttcgttggaaacgggaatatcttcacatgaaaactagatgaaagcattctcagaaacttctttgtgatgtgtgcattcaactcacagagttgaaccctccttttgattgagcagttttgtagcactctttttgtagaatctgtaagtggatatttggaacactttgaggcttatggttgaaaaggaaatatcttcatagaaaaactagcaagaagtgttctcagaaactactttgtgatgtgtgcttacgactcacagaatttaacctttcttttgatagaggagttttgaaacagtctttttgtagaatctgctagtggataattggagtgctttgaagcctttgttggaaactagaatatcttcacacatgtactagacagaagcattctcagaaacttgtttgtgatgtttgcattcaactcacagagattaacctttcttttgacagagcagttttgaaacactctttttgtagaatctacaagtggacatttggagcactttgagggctatggtggaaaaggtaatatcttcacataagaactagatagaagcattctccgaaacttctttgtgatgtgtgcattcaacgcacagagcttaactttcctttggaaagaacacttttgaaacactctttttgtagaatctgcatttggatatttggactgctttgaagccttcgttggaaacgggaaaatcttcatataaaaactagacagaagcatgctcggaaacttctttgtgatgtgtgcattcaaaccacagagttgaaccctccttctgatagagaagtttcaaaacactctttttgtagaatctgcaagtggatatttggagccctttgaggccttttgtagaaaaggaaatatcttcatagaaaaactagaaagaagcattctcagaaactattttgtgatgcgtgcattcatatcacagaattgaacgtttcttttgatagagcagttttgaaacactctttttgtcaaatctgcaagtggacatttggagaaatttcagtgctaccatggaaaaggaaatatcttcacataaaaactagacagaagcattcgcagaaaagtctttgtgatgtttgcattcaactcacagatttgaaactttcttttcatttagcagttttgaaacaattttttttgtagaatctggaagacgatatttgtactgctttgaccccttcgttggaaacgggaatagcttcacatgaaaactagacagaagcattatcagaaacttctttgttatgtgtgcattcaactcacagagttcaactttccttttgatagggccgttttgaaaaactcttcctgtagaatctgtaagtgtatatttggactggttttaggccttcattgaaaaagggaatatcttcacataaaaactatacagaagcattctcagaaacttctttgtgatgtgtgcattcatcttacagttttgaaccttccgttgaatggtgcagctttgaaacactctttttgtagaatcagcaattggatatttggagcgatttgagccctattgtagaaaaaggaaatattttcatataaaaactagacagaagtattctctgaaactaatttgtgatgtgtgctttcatctcacagagtttaaactttcttttgatagagcagttttgaaacactctttttgcactatctgcaagtggataattggagtcctttgaagcctttgttggaaacgggaatatcttcatatataaactagacaaaagcattctcaaaatctactttgtgatgtgtgcattcaactcacagagattaacttttcttttgatagatcagctttgaaacactctttttgaagaatctgcaagtagacatttggagcactttgagggctctggtggaaaacgaaatatcttcacatgaaaaccagacagaagcattctcagaaacttctttgtgatgtgtgcattcaactcacagagttgaaactttcttttgatagagcagtttttaaacacactttttgtagaatctgcaagttgacatttggagcactttgaggtctatggtggaaaaagatatatcttcacataaaaactagacaggagccttctctgaaacttctttgtgacgttcggattcaactcacagagttgaaactttcttttgatacagcagctttgaaacactctttttgtagaatctgcaggtggatattttgactgctttgaggccttcgttggaaaagggaatatcttcacataaaaactagacagaagctttctcagaaacttctttgtgatgtgtgcattcaactcacagagttgaaccttccttttgatagagcagttttgaaacaatatttttgtagaatctgcaagtggatatttggagtgctttgaagccttagttggaaacgggaatatcttcatataaatactagacagaagcattctcagaaccttctttgtgatatgtgcattcagctcacagatttgaaccatccttttgatagagaagttttgaaaccctctatttgtagaatctgcaggtggatatttggagcattttgagtcctactgtagaaaaggaaatatcttcatataaaaactagaaagaagcattctcagaaagtactttgtgatgtgtgcattcaactcacagaatttaaactttcttttgatagagcagttttgaaacactctttttgtagaatctgcaagtggataattggagtgctttgaagccttcattggaaacgggaatatcttcacataaaaactagacagaagcattctcagaaactgctttgtgatgtgtgcttgcagctcacggaatttaatctttcttttgatagggcagttttgaaacactctttttgtagaatctgcaagtggataattggattgctttgaagccttcgttgcaaacgggaatatctttaaataaaaatttgtaatgcttacattcaactcacagagtgtaacctatcttttagtagagcagttttgaaacactttttttgtagaatctacaagtgcacagttggagcactttgagggctatagtggaaaaggaaatatcttcacataaaaactagatagaagcattctcagaaagttctttgtgatgtttgcattcaattcatagagttgaacatttcttttgatagagcagttttcaaaaactctttttgtagaatctgcaagtggacatttagagtactttgaggcctatggtggaaaaggaaatatcttcacataaaaattagacagaagcattctcagtaatttctttctgatgtatgcattcaactcagagagttgaacatttcctttgatagaatagttttgaaacactccttttgtagaatctgcaagtggatatttggactgctttgtcgccttcgttggaaatgggaatagcttcacataaaaactagacagaagcattctcagaaacttctttgtgatatgtgcattcaactcacagattttaaccattcttttgatagagccgttttgaaacacttcttgtagaacctggaagttgataattggagtgctttgaagcctccgttgcaaacgggaatatcttcacataaaaactagacctaagcattctgagaaacatttatgtgatgtgcgcattcaactcacagagttgaaccctccttttgatagggcagtattgaatctctctttttgtagaatctggaagtggatatttggagcacattgaggtctatggtagaaaagggaatatcttcacataaaaactagacagaagcattctcagaaactagtttgtgatgtgtgcattcaactcacagagttgaacctttgttttgatagagcagttttgaaacactctttttgtagaatctgcaagtggatatttcgactgctttgaagccttcgttagaaacaggaatatcttcacataaaaactagacagaatcatttcagaaactactttgtgatgtttgcattcatctcagagagttgaacctttcttttgatagaacagttttgaaacaccctttttctagaatctgctggtggacatttggagtactttgtggtcgatggtgaaaaggatatatcttcacataaaaactagacaggaacattctcagaaacttctttgtgatgtttgctttcaacacagggagttgaaactttctgttgatagaggagttttgaaacactatttttggagaatctgcaagtgaatatttagaccactttgaggccttcattggaaacgggaatattttcacataaaaactagatagaagcattctcagaaacttctttttgatgtttgcattcaattcacagaattgaaccttccttttaattgaaaagttttgaaacactctttttgtagaatatgcaattggatatttggagtgctttgaagccttcattagaaacggaaatatcttcacataaaaactagatagaagcattctcagaaacttctttgtgatgtgtgtatacaactcacagatttgaacctttcttttgatacagcagtttttaaacactctttttgtagaatctgcaactgtatatttggagtgctttgaagacttcattggagacgggaataacatcacataagaactagatggaaacattctcagaaacttcttcttgatgtgtgcattcaacctacagagttgaagcctccttttgatagagcagttttgaaacactctttttgtagattctgcaagtggatatttggggtgctttgaagagtttgtcggaaacgtgaatatcttcacataaaaactagtcagaagcattctcaaaaattactttgtgatgtgtgcattcaactcacagagtttaacctatttttgatagagcagttttgaaacactccttttgtggaatcagcaagtggacatttgtagcactttgagggctttggtggaaaaggaaatatcttcacataaaaactagacagaagcaatctcagaaacttctgtgatgtttgcattcaactcacagattggaacatttcttttgatagagcagttttgaaacgctctttttgtagaatctgcaagtggacattaggaacactttgagtgctagagtggaaaaggagatatcttcacataaaaactagacagaagcattctcagaaacttctttgtgatgtttgaattcaactcagagtgttgaacatttcctttgatagagcagttttgaaacactctttttgtagaatctgcaagtggataattggagtactttgaagcgttgttggaaacggtaatatcttcacataaaaactagacagaagcattctcagaaactactttgtgatgtgtgcattcaactcacagagttaaaccttccttttgatagagcagttttgaaacactctttttatagtatctgcaagtggatatatggagtgctttgaagccttcattggaaatgggaatatattcacataaaaaatatacataagcattctcagaaacttccttgtgatgtgtgccttcaactcacagagctgaaccttccttttgataaagcagttttgaaacactctttttgtggaatctgcaagtggataattggagtaattttaagcattgttggaaacgggaatatcttcacataaatactagacagaagcattcttagaaacttctttgggatgtgcgcattcaactcacagagttgaaccctacttttgatggagcagttttgaaacgctctttttgtagaatctgcaagtggatatttggagtgctttgaggcctatggtagaaaaggaaatatgttcatataaaaactagacagaagcattctcagaaattactttttgatgtgtgcattcaacttacagagttgaacctttcttttcataggacagttttgaaacactatttttttagtgttggcaagtggatatttggactgctttgaggcctttgttggaaacaggaatatcttcacataaaaactagacagaggcattctcagaaacttctttgtgatgtgtgcattcaactcacagaattgaaccttccttttgatagagcagttttttcttcttttctttatttattatgattatactttatgttttaggttacatgtgagcaatgtgcaggttagtaacgtatgtatacatgtgccatgctggtgcgctgcacccactaactagtcatctagcattaggtatatctcccaatgctatccctccccctttcccgcaccccacaactgtccacacaatgtgatgttccccttcctgtgtccatgtgatctcattgttcaattcccacctctgagtgagaatatgcggtgtttggttttttgttcttatgatagtttactgagaatgatgatttccaatttcatccatgtccctacaaaggaaatgaactcatcattttttatggctgcatagtattccatggtgtatatgtgccacattttcttaatccagtctatcattgttggacatttgggttggttccaagtctttgctattgtgaatagtgctgcaataaacatacatgtgcatatgtctttatagcagcatgatttatagtcctttgggtatatacccagtaatggtatggctgtgtcaaatggtatttctaggtctagatccctaaggaatggccacactgacttccacaattgccgaactagtttacagtcccaccaacagtgtaaaagtgttcctatttctccacatcctctccagcacctgttgtttcctgactttttattgattgccattctaactggcatgaaatggtatctcattgtggttttgatttgcatttctctgatggccagtgatggtgagcatttgttcatgtgttttttggctgcataaatgtcttcttttgagaagtgtctgttcatgtcctttgcccactttttgatggggttgtttgtttttttcttgtaaatttgttagtgttcattgtagattctggatattagtcctttgtcagataagtaggttgtgaaaattttctcccactttgtaggttgcctgttcactctgatgctagtttgttttgctgtgcagaagctctttagtttaattagatcccatttgtcaattttgtcttttgttgtcattgcttttggtgttttagacatgaaatccttgcccatgcctatgtcctgaatggtaatgcctaggttttcttccagggtttttatggttttaggtctaacatttaagtctgtaatccatcttaaattaatttttgtataaggtgtaaggaaggaatccagtttcaggtttctacatatggctagccagttttctcagcaccatttattaaatagggaatcctttccccattgcttgtttttctgaggtttgtcaaaggtcagatagttgtagacatgcggcgttatttctgagggctctcttctgttccattgatctatatctctgttttgatatcagtaccattctgttttggttactgtagccttgtagtatagtttgaagtcaggtagtgtgatgcctccagctttgttcttttggcttaggattgacttggtgatgcgggctcttttttggttccatatgaactttaaagtcgttttttccagttctgtgaagaaagtcattggtagcttgagggggatggcattgaatctgtaaattaccttgggcaatatggctattttcacgatattgattcttcctacccatgagcatggaatgttcttccatttgtttgtatcctcttttatttctttgtgcagtggtttgtagttctccttgaagaggtccttcacatcttttgtaagttggattcctaggtattttattctctttgaatcaattatgaatgggagttcactcatgatttggctctctgtttgtatgttggtgtataagaatgctgtgatttttgtacattgattatgtatcgtgagcctttgctgaagttgcttatcagattaaggagactttgggctgatacaatggggttttctagatatacaatcatgtcgtctgcaaacagggataatttgacttcctcttttcctaattgaatacccgttatttccttcttctgcctaattcccctggccagaacttccaacactatgttgaataggagtggtgagagagggcatccctgtcttgtgccagttttcaaagggaatgcttccagtttttgcccattcagtatgatattggctgtgggtttgtcatagatagctcttattattttgagatatgtcccatcaatacctaatttattgagagtttttaacatgaagggttgttgaattttgtcaaaggctttttgtgcatctatagagataatcatgtggtttttgtctttgttctgcttatatgctggattacatttattgatttgcgtatattgaaccagccttgcaccccagggatgaagcccacttgatcatggtggataagctttttgatgtgctgctggatttggtttgccagtattttattgaggatttttgcatcaatgttcatcaaggatattggtctaaaattctcttttttggttatgtctctgcctggctttggtatcagaatgatgcttgcctcataaaatgagttagggaggattccctcttttctattgattggaatagtttcagaaggaatggtaccagttcctccttgtacctcttgtagaattcggctgtgaatccatctggtcctggtttctttttggttggtaaactattgattattgtgacaatttcagttcctgttattggtctattcagagattcaacttcttcctggtttagtcttgggagagtctatgtgtcgaggaatttatccatttcttctagattttctagtttatttgcatagaggtgtttgtagtattctctgatggtagtttgtatttctgtgggatcggtggtgatatcccctttatcattttttattgcatctatttgattcttctctctttttttctttgttagtcttgctagcggtctatgaattttgttgatcctttcaaaaaaccagttcctgtattccttaattttttgaaggttttatgtgtctctgcttccttcagttctgctctgattttagttatttcttgccttctgctagtttttgaatgtgtttgctcttgcttttctagttcttttaattgtgatgttagggtgtcaattttggatctttcctgctttctcttgtgggcatttagtgctatatatttccctctacacactgctttgaatgcaacccagagattctggcatgttgtgtctttgttatcattgatttccaagaatatctttatttctggcttcatttcattatgtacccagtagtcattcaggagcaggttgttcagtttccatgtagttgagcggttttgagtgagattcttaatcctgagtttgattgcactgttgtttgagagacagtttgttataatttctgttcttttacacttgctgaggagagctttacttccaagtatgtggtcaattttggaataggtgtggtgtggtgttgaaaaaaatgtatattctcttgatttggggtggagagttctgtatatgactattaggtccgcttgatgcagagctgagttcaattccttggtatccttgctgactttctgtctcattgatctgtctaatgttgacagtggggtgttaaagtctcccattattaatgtgtgggagtctaagtttctttgtaggtcactcatgacttgctttatgaatctgggtgctcctgtattgggtgcatatatatttaggatagttagatcttctttttgaatcgatccctttatcattgagtaatggccttctttgtctcttttgatctttgttggtttaaagtctgttttatcagagactaggattgcaacccctgccttctttgttttccatttgcttggtagctcttcctccgtccttttcattttgagcctatgtgtgtctatgcccgtgagatgggtttcctgaatacagcacaatgatgggtcttgactctttatccaatttgccagtctgtgtcttttaattggaacgttttgcccattcacatttaaagttaatattgttatgtgtgaatttgatcctgtcatgatgttagctgtttattttgctcgttaattgatgtagttttttcctagtctcgatggtctttacatttttgcatgattttgcagcagctggtactggttgttcctttctatgtttaacgcttccttcaggagctcttttagggctggcctggtggtgacaaaaatctctcagcagttgcttgtctaaaggattttatttctccttcacttatgaagcttagtttggctgtatgtgaaattctgggttgaaaattcttttctttaagaatgttgaatattggcccccactctcttctggcttgtacagtttctgccaagagatctgctattagtctgatgggcttccctttgagggtaacccaacctttctctctggctgcccttaacattttttccttcatttcaactttgctgaatctgacaattatgtgtcttggagttgttcttctcgaggagtatatttgtggcgttctctgtatttcctgaatctgaatgttggcctgccttgctagattggggaagttctcctggataatatcctgcagagtgttttccaacttggttcctttctccccatcactttcaggtataccaatcagatgtagatttggtcttttcacatagtcccatatttcttggaggctttgtttttttctatttattcttttttctctaaacttcccttctcacttcatttcatttatttcatcttctatcactgattccctttgttccagttgattgcatcggctcctgaggcttctgcattcttcacgtagttcttgagacttggttttcagttcctttaagcagttctctgtatttgttatcctagttacacattcttctaaatttttttcaaagttttcaacttctttgcctttggtctgaatgtcctcccatagctcggagtaatttgatcatctgaagccttcttctctcagctcgtcaaagtccttctatgtccagctttgttccattgctggtgaggaactgcattcctttggaggaggagaagccctctgctttttagagtttccagtttttctgctctgttttttttcccatctttgtggttttatctacttttggtctttgatgatggtgatgtacagatgggcttttggtgtggatgtcctttctgtttgttagttttcctcctaacagacaggatcctcagctgcatgtctgttggagtacccagccttgtgaggtgtcagtatgcccctgctggtggggacctctcagttaggctgctctcgggtcaggggtcaaggacccacttgaagaggcagtctgcctgttctcagacctccagctgcatgctgggagaaccactgctctcttcaaagctgtcagacagggacatttaagtctgcagaggttactgctgtctttttgtttgtctgtgtcttgcccccagacgtggagcctacagaggcaggcaggcctccttgagctgtggtgggcttcacccagtttgagcttcctggctgctttgtttacctcagcaagcctgggcaatggcgggtgcccctcccacagcgtccttgcccccttgcagtttgatctcagactgctgtgttagcaatcagggagactccctgggcgtaggaccctcggaggcatgtgtgggatataatctcctggtgcaccattttttaagcccattggaaaagtgcagcattcgggtgggagtgacccaattttccaggtaccctctttcaccattttctttgactaggaaagggaactccctgaccccttgcacttcccaagggaggcaatgccttgccctgctttggctcatgcacggtgcacgcacccatgagagagcagttttgaaacaccctttttgtagaatctgcaagtggatatttggagagctttgagtcctatcatgcaaagggaaataacttcacataaaaaatagacagaagcattctccaaaacacctttgtgatgcttacattcaactcacagaggtgaacctttcttttgatagagcagttttgaaacactcttttttttagaatctgccattggttatttggagcgctttgaggcctttggtggaaatgggaatatcttcagataaaaaccagacagaagcatgctcagacactactatgtgatgtttgcattcagctcacagagttgaacctttttgatagagcagttttgaaacactctttttgtagtttctgcaagtggatatttggactcctttgaggacttcgttggaaatgggaacatcttcacataaaactagacagaagtattctcacaaacttctttgtgacgtgtgcattcaactcacagagttttaccttccttttgatataacagttttgaaacactctttttgtagaatctgaaagcggatgtttggagtgctttgaggccttcagtgggaatgggaatatcttcacataaaaaacagcagaagcattataaaaaacgtctttgtgatgtgttcattgaatgcagagagttgaacgttgcttttggtagagtagttttgaaacactctttttgtaaaatctgcaggtggatatttggagcactttgaggcctatggtggaaaaggaattatcttcacacaaaaactagacagaagcattctgagaatcttctttgtgatgcttgcattgaactcacagtgttgtaccttccttttgatagagcagttttgaaacactctttttgtagaatctgcaagtggacatttggagagttttgaggcctgtggttgaaaaggaagtatcttcatataaaaactagagagaagcattatcagaaacttctttgtgatgtatgcattcaactcacagagttgaaccttccttttgatagaacagttttgaaacactgtttttgtagtatctgcaagtgaatatttgaaatgctttgaggcctactgcggaaaaggaaatatcttcacataaaaactagacagaagcattctcagaaacttctttgtgatgtgtggattcaactcacagagttgaacctttcttttgatagagcagttttgaaacagtctttttgtagaatctgcaagtggatatttgaagcaccttgaggcctatggtaaaatagcaaatatctttacgtaaaactaaacacaagcattctcagaaatgctttgtgatgcttgcattcaactaacagttttgaaccttccttttgatagagcaattttgaaaatctttttgtagaatctgtaagtggatattcagagcgctttgaggcctatggtggaaatgggaatatcttcacataaaaagttgacagaaacattctcagaaactactttgtgatgcgtgcattaaactcagagagttgaacgttactttcaatagagcagtttggaaacactctttttgtagaatctgcaagtggatatttggagcgctttgaggcctatggtagaaaaggaaatagcttcatataaaaactagacagaagcgttctcagaaacttctttgtgatatatgcactcaactcatagagttgaaccttccttttgatagagcagctttgaaacactctttttgtagaatctgccagtggatatttggactgctttgaggccttcggtggaaacgggaatatcttcacttaaaaactagacagaaggattctgagaaacttctttgtgatgtgcacattcaacccactgagttgaaactttctattgtttgagcagtttggaaacagagttttgtaatatctgcaaatggataattggagatctttgacacctacggtggaaaatgaaatatcttcacataaaaactagacagaagatttcttggaaacttctttgtaatgtgtgcattcatctcacagagttgaacatttctttttttgagcagttttgaaacactctttttgtagaatctgcaagtggatatttggagccctttgtttcctatagtggaaaaggaaatatcttcacttaaaagtagacagaagcattctcagaattttctttgtgatgtgtacattcatctcacagagttgaacctttcttttgattgagcagttttgaaacactctttttgtagaatcagcaagtggatatttcgaatgctttgcgacctatagtggagaaaggaataccttcacataaaaactagacagaagcattctgagaaactattttgttatgtgtgcattcatctcagagtgctgaactgtttttttatttgagcggttttgcaacactctttttatagaatctgcaagtggatatttggagaattttgccacctatagtgggaaaggaaatatcttcacataaaaacaagacaaaagcattctgagaaactcctttgcaatgtgtgcattcatctcagagaatagaacttttcttttgattgagcagttttgaaacactctttttgtagaatctgcaagggtgtatttggggcgttttgaggcctgtggcggaaaaggaaatttctttacataaaaactctgcagaagcattctgagtcacttctttgtgatgcgtgcattcatctgatgtagttgaacctttcttttgattgagtagtttggaaacactctatttgcaggatgtgcaagtagatatttggagcaccttgatgcccatggtggaaaacaaaatatcttcacataaaaactacacagaaacattctgagaaacttatttgctatgagtgcattcatctcacagagttgaaacttttttttgattgaacagttttgaaacactctttttgtagaatgtgaaagttgatattttgagcgctttgaggcctgtagtggaaaaggaaatatcttcacataaaaactacacagaagatttctgagaaaattctttgtgatttgtgcattcaactcacatatttgaacctttcttttgataaagcagttggtaaacagtctttttgtagtatctgtaaatggaaatttggagcactttgaggcctatagtggagaaggtaatatctacatataaaaactagacagaatcattatgagaaacttctttgtgaagtgtgcattcatctcacagagttgaaccttacttttcattgagcagttttgaaacactctatttgtaggatctgcatgtggatatttggcgcattttcagtctatagtggacaaggaaatatcttcacataaaaactagacagtagcattctgagaaacttctttgtgatgtgtgcattgatctcacattgtgaaagtttctttcgattgagtactttggaaacagtctttttgtagtatctgcaaatggatatttggggcgcttaaaggcctatagtggaaaaggaaatatcttcacaaaatagatagacagaagcattctgagaaacttcattgtgctgtgtgcattcatctcagagatttaaacttttgttttgattgtgcagttttgaaatactctttttgtagaatctgcaagtggatatttgtagccatttgcggcctatagtggaaaagcaaatatcatcacataaaaacaagacagaagcattctgagaaacttctttgtgatgcatgcatgcatctcacagagttgaagctttcttctgattgagcagttttgaaacagtctttttgtaaagtctgcatgtggatatatggagagctttgggcctatagtggaaaaggaaatattttctcattaaaactggacaaaagcattctgagaaatttttttgtgatctgtgcattcaactcacagatttgaacttatcctttgattgatcagtttggaaacattctttttgtaatatcagccagtggatatctcaagcgattgagacttatagtggaaaaggaaatatcttcaggaaaaactagacagaagaattctgataaacttctttgtgatgtgtgccttcatctcacagtgttgaacctttcttttaattcagcagctttgaaaaagtctttttgtagaatctgcatgtggatatttggagtgctttgctgcctatagtgaaaaaggaaatatcttcacataaaatctagacagaagaagtctgagaaacttccttgtgatgtgttcattctccacacagatttgaaattttcctttgattgagcaattttgaaacactcttttttttgtgcaagtggatatttggagcacttttaggcatatcatggaaatggaaatgtcttcatataaaaactagacataaaaattccgagaaacttgtttgtgatgtgtgccttcaactcacagtgttgaaactttcttttgattgaagagtttggaaacactcttttgtagtatcggcaagtggatatttggatcgtttcacggtctaaagagggaaagaaaatattttcacataaaaactagacaaaagcactctcagaaacatctttgtgatgtgttcattcatctcacagggttgaaccaatcttttgattcagtagttttgaaacactctctttgcagtatctgcaagggaatatttggagcgctatgaggcctatggtggaaagcaaatatctttacataaaactagacagaaacattctgagaaacttctttgtgaagtgtgcagtgatctcacagatttgaacctttgttttgatttagctattttgaaacactctttttgtagagtctgcaagtggatatttggagcactttgtggcctacggtagaaaattaaatatcttcacacaaaaactagcaagaagcattctgagaaacttctttttggtgtgtgcatgcaactcaaagagttgaacctttcttttgattgagcagtttgtaagcattctttttgtagcatctgcaaatgtatatttagagtgccttaaggcctacagtggaaaaggaaatatcttcacataaaaactagatggaagcattctgagaaactactttgtgatgtgtgcattcatttcaaagagtttaacctttcttttgattgagcagttttgaaacactctttttgtagaatctgcaaggggatatttgcagcgatttttggcgtatattggaaaaggaaatatcttcacataaaacctagagagaagcattctgagaaacatcttcctgaagtgtgcattcaacttacagagatgaacctttcttttgattgagcagtttggaaacactctttttgtagtatctgcaaattgatattttgagtgctttgaggcttatggtggaaaaggacatatcttcacataaaaaccagacagaagaattctcagaaacgtctttgtgatatgtgcattcatctcacagagttgaaactttcttttcgttgagcagttttgaaacccttattttgtagaatctgcaagtgtatattaggagagcttttctgtctatggtggaaaaggaaatatcttcacataaaagctagactgaaacattctgagaaacttctctgtgatgtgttcattcatctcagatagattaatctttctttttattgagcatttttgaaccactcttttttaagtatctgcaagtggatatttggagcacattgtggcctatagtggaaaaggaaatatcttcacattaaaactagactgaagctttctgagaaacttctttgtgatgtatccattcatctcacgagatgaacatatcttttgattgagcagtttggaaacactctttttgtagaatctgcagttggatatttggagctcttgaggcctatgttggaaaaggaaatatcttcacataaaaaccagacagaagcattctgataaattgctttgtgatgtttgccttcaactcacagagttggatctttcttttgattgagcagttaagaattattctgtatgtagtatctgcaattggatatttggagagctttggggcctatagtggaaaaggaaatatcttcacagaaaaactagacagtagcattctgagaaaattctttttgatgtgttcattcatctcacgagatgaacatttttttttgactgagcagttttgaaacactgtttttctagaatctgcaattggatatttggtgcgctttgaggcatatggtgaaaaaggaaatatcttcacattaaaaatagacagaagcactctgagaaacttttttgtgatgtgtgcattcatctcgcagtgttaaaactttcctttgattcagcaattttgaaacactcttcttgtagaatctgtgagtggatatttggaacccattcaggcatatagtggaaaacgatatctcttcacatagaaactagacaaaaacattctgagaaattaccttgtgatgtgcactttcaactcacagagttgaacttttcttttgattggggagtttggagacagtctttttatagtatctgcaaatggatatttggagagcttacagtcctacggtggaaaaggaaatatctttacatgaaagctagacagaagaactctgagaaacttccttgtgatgtgtgcattcatctcacagagttaaacctttcttttcattgagcatttttaaaacactcttttttacaaatctgcaattggagatttgagtgctttgcggcctatagtgtaaaagaaaataccttcaaataaaaactagacagaagcattctgggaaacttctttgtgatatgtgcattcatctcacagagttgaaactttcttttgattgtgcagttttgaaacactctttttacagaatctgcaattggatatttggagtgctatgaggcctattgtggaaaaggaaatatcttcacataaaaactagacagaagcattctgagaaagttctttgtcatgtgtgtattcacctcacagtgttgcaaatttcttttgattgagcagtttggaaacagtctttatgtactatctgcaaatggatattttgagcgctttgtggcctatagaggaaaaggagttatcttcatataagaactagacagaagcattctgagaatcttctttgtgatgtgttcattcgtctcacagtgttgaagctttcttttgattgacagttctgaaacactttttttttagaatctgcaagtggatatttggagcgctttgtggcttatattggaaaaggaaatatcttcaaataaaaactagacagaggtattctgagaaacttctttgtgatgtgtgcactcatctcacagagttgaacctttattttgattgagcagttttgaaacactctttttgtagaatctgcaagtggatatttggagcgcttggctgcctatggtgaaaaagaaaatatcttcacgtaaaaacaagacagaatcattctgagaaactcctttgtgatgtgtgcattcatctcacacagttgaacatctcttttcattgggaagttttgaaacactctttttgtagaatctgcaagtggatattttgagcgatttgaggcctatggtggaaaaggaaatatcttcacctaaaaactgtacagaagcattctgagaaacttctttgtgatgtgtgcattcaactcacagagtggaacctttcttttgcttgagcagtttggaaacattctttatgtagaatctgcaaatggatatttggagagctttgaggcctatggtataaaaggaaatatcctcacataaaaactagcaataagcgttctgagaaactcctttgtgatgtgcacatacaactcaaggagtggaaccttactttggattgagcaatttgtaagcattcttttgtatttatttttaatttactttacgttttagggtacttgtgcacaatgtgcatgttagttacatatgtatacatgtgccatgctggtgtgctgcacccattaattcatcatttagcattaggcatatctcctagtgctatctccccacttcccccaccccataacagtccccagagtgtgatgttcccctttctgtgtccatgtgttctcattgttcaattcctacctatgactgagaacatgcattgtttggtttttttgtccttgagatcgtttactgagaatgatgatttctgaattaatccgtgtccctacaaaggacatgaactcatcattttttatggctgcatagtataccaaggggtatatgtgccacattttcttaatccagtatataattgttggtcatttgggttggttccatgtctttgctattgtgaatagtgctgcaataaacttacatgtacatgtgtctttatagcagcatgatttatactcctttaggtatatacccagtaatgggatggctgggtcaaatggtacttctagttctagatccttaaggaatcgccacactgacttccacaagggttgagctagtttacagtcccaccaacagtgtaaaagtgttcctatttctccacatcctctccatcacctgttgtttcctgactttttaatgattgctattctaactggtgtgagatggtatctcattgtggttttgatttacgtttccctgatggccagtgatggtgagcatttgttcatgtgttttttggctgcataaatgtcttcttttgagaagtgtctgttcatgtcctttgcccactttttgatggggttgtttgatttttttcctgtaaatttgtttgagctcattgtagattctggatattatccctttgtccgatgagtaggtagtgaaaattttctcccattttgtaggttgcctgttcactctgatggtagtctcttttgctgtgcagaagctctttaatttaatttgatcccatttgtcaattttgtcttttgttgccattgcttttggtgttttagacatgaagtccttgcccatgcctatgtcctgaatggtaatgcctaggttttcttctagggtttttatggttttgggtctaacatttaagtctttaatccatcttaaattaatttttgtataaggtataaggaaggaatccagtttcaggtttctacatatggctagccagttttctcagcaccatttattaaatagggaatcctttccccattgcttgtttttctgaggtttgtcaaagatcagatagttgtagatacacagcattatttctgagggctctcttctgttccattgatctatatctctggtttgttaccagtaccatgcagttttggttactgtagccttgtagtatagtttcaagtcaggtagcatgatgcttccaggtttattcttttggattaggattgacttggtaatgtgggctccttattggttccatatgaattttaaagtagtttttttccaattctgtgaagaaagtcattggtagcttgatgggaatggcattgaatctataaattaccttggtcagtatggccattttcacattattgattcttcctatccatgagcatggaattttcttccatttctttgtatcctcttttatttccttgtgcaatggtttgcagttctccttgaagaggtccttcacgtcccttgtaagttggattcctaggtattttattctctttgaagcaattatgaatgagagttcactcatgatttggatctctgtttgtctgttattggtgtataagaattcttgtgatttttgtacgttgattttgtatccacaacataccagaatctctgggacacattcaaagcagtgtgtagagggaaatttatagcactaaatgcccacaagagaaagcaggaaagatccaaaattgacaccctaacatcacaattaaaagagctagaaaaacaagagcaaacacattcaaaagctagcagaaggcaagaaataactaaaatcagagcagaactgaaggaaatagagatacaaaaaaccctacaaaaaattaatgaatccaggagctggttttttgaaaggatcaacaaaattgatacaccactagtaagactaataaagaagaaaagagagaagaatcaaatagatgcaataaaaaatgataaaggggatatcaacaccaatccaacagaaatacaaactaccatcagagaatactacaaacacctctacacaaataaactagaaagtctagaagaaatggataaattcctcgacacatacaccctcccaagactaaactatgaagaagttgaatcaatgaataggtcaataagaggccctgaaattgtggcaataatcaaaagcttatgaaccaaaaagagtccaggaccagatggattcacagccgaattctaccagaggtacaaggaggaactgatacctttctttatgaaactattccaatcaatataaaaagagggaatcctccctaactcattttatgaggccagcatcttcctgataccaaagcctggcagagacacaaccaaaaaagagaattttacaccaatatcctttagaacattgatgcaaaaatcctcaataaaatactggcaaaccaaatccagcagcacatcaaaaagcttatccaccatgatcaagtgggcttcatccctggggtgcaaggctggttcaatatatgcaaagtaataaatgtaatcccgcgtataaacagaaccaaagacaaaaaccacatgattatctcaatagatgcagaaaaggcctttgacaaaattcaacaacccttcatcctaaaaactctcaataaattaggtattgatgggacgtatctcaaaataataagagctatctatgacaaacccacagccaatatcatactgaatggacaaaaactggaagcatttgctttgaaaactggcacaagacagggatgccctctctcaccactcctattcaacatagtgttggaagttctggactgagcaatttggcaggagaaggaaataaagagtattcaattaggtaaataggaagtcaaattgtccctgtttgcagatgacatgattgtatatctagaaaaccccattgtctcagccccaaatctccttaagctcataagcaacttctgcaaagtcactgtaagcattctttttggagcatctgcaaatgtatatttggagcgccttgatacctttagtgaaaaaggaaatatcttcacataaaactagacagaagcattatgagaaacttcttagtgatgtctgcattcatctcaaagaagtgaagctttcttttgattaagtagttttgaaatcctctttttgtagaatctgcaagtggatataaggagagctttgtggtctatagtggaaaaggatatatcttcacgtaaaaacgagacagaaacattctcagaaacttttttgtgatgtgtgcattcatctcacagagctgaaactttcttttgatagagaagtttgaaacactattttttaaggttctgcaagtggatatttggagcactttgtggcctagagtggaaaaggaaatatcttcatattaaaaatagagagaagcattctgagaaacttcttcatgatgtgagctttcaactaacagagttgaacctttctttagattgaccagtttggaaaccctctttttgtagtatctgcaaatggatatttggagcgctttcagtcctatgttggaaaaggaaatatcttcacataaatacaagacagaagcattctcagaaagtactttgtgattgagcattcaactcacagagttgaaacgttcttttgattgaacagtttggaaacaggcttttgtagtacctgcaaatggatatttggagcgcgttgaggcctatagtggaaaaggaattatcgtaccataaaaactatacagaagcgttctgaaaaacttcttttctgtgtgtgcattcatctcacagagttcaacttttgttttgattgaacagcttggaaacactccttttgtagaatctgcaagtggatatttggagcccttcgaggcctattgtggaaaaggaaatatcttcacataaaaaccacacagaagcattctgataaacttctttgtgatgtgagcattcatctcatgtagttgaaacttgtttttgattgagcagatttgaaacactctttttgtagaatctgcaattggatatttggaatgctttgcagcctttagtggaaaagcaaatattttcacataaaaccaaaaaagaaacattctgggaaacttctttgtgatatgtgcattcatcccacagagttgaacttttcatttgattgagcacttctgcaacactcttgttgtaggatctgcaaattgatatttggagcgctttgaggcctatggtggaaaaggaaatatcttcccataaaaactagacagaagcattctcagaaatttatttgtgatgtgtgcattcatctcacagagttgattatttctttcgattgagcagcttggaaacggctttttgaagaatcagaaaatgaatatttggagcgctttgaggcctgtggtggaaaatgaaatatctccacataaaaactagacagaagcattctgataaacttctttctgacgtgtgcattcatctcacagagttgaaactttattttgattgagcagttttgaaacactctttttgtaatatctataagaggatattttgagtgctttgaggcctatggtgaaaaaggaaatatcttcacataaaaccacagagcagcattctgggaaactcctttgtgatgtgtgcattcaactcactgagttgaacctttcttttgatagagcagtttggaaacagtctttttgcagtatctgaacatagataattggagcgctctgaggcctttggtggaaaagtaaatatcttcacataaaaactaggtgctacattctgagaatcttcttagtgatgtgtgcatacaactcacagagttgaatctttctactgattgagcatttttgaaacactccttttgtggaatctgcaagtgcatattcacagcagtttgcattaagtagtgtaaacggaaatatcttcaaataaaaactagacagaaggattctgagatacttttttgtgatgagtgcattcatctcacagatttgtacatttcttttgattcagcagtttttaaacactctttttctagtatctgcaataggatattaggagtgctttgaggcctttgttggaaaaagaaatattttctcataaaaactacagagaagcattctgagaaacttctttctgatgtgtgcattagactcacagagttgaaactttcttttcattgagcagttttaaacccactttttgttgaatctgcaagtggatatttggagcactttgaggcctatggtggaaaaggaaatatcttcccataaaaactagacagaaacattctgagaaacttctttgtgatgtgtgcattcatctcacagagttgaacctttattttgatttagccgttttggaacattctttatgtaggttctgtaagtggatatttagagcgctttgcggcctatagtggaaaaggaaatatcttcacataaaagctagacagaagcattttgagaaacttctttatgatgtgtgcattcttctcacagagttcaacctttctttggattgagcagttttgaatccctttttgtaggatctgcatgtggatatttggaatggtttgaggcgttttgtggaaaaggcaatatcttcacatataaagttgacaggggcattctgagaaacttctttgtgatgtttgcattccactcacacagttgaaactttcttttaattgagcagtttgaaacactctttttgaagtatctgtaagtacatatttggatcactgtgcggcctatgtttgaaaagttaatatcttcacataaaaactacacaaaagcattctgagaacgtcttcatcatttgtgcattcactcacagatttgaaattttcttttgattgggcagtttggaaacagtctttttgtagtatctgtaaatggatattttgagtggtttcaggcctatagtggaaaagaaaatatcttcacataaaaactagacagaagcattctgagaaagttctttgtgatgtcttcattcctctcagatagttgaaactttcttttcattgagcagttttgaaacactcattttctagaatctgcaagtggatatttgaatcactttcagtcctactgtgtaaaaggaaatatcttcacataagaactacagaaaagcagtctcagaaacttctttgtgatgtgtgcattcctctcacagagttgaacttttcttttgattgagcagtttggaaacacacactttttagaatctgcaagtggatatttggagcactttgaggcctatgtggaaaaggaaatatcctcaaataaaaactacacagaagaattcttagaaatttctatgtaatgtgtgcattcacctcatacagttgaacgtttcttttcattcagcagcttggaaacactttctttgtagaatctgcacatggatatttggagtgctttgtggcctattgtggaaaaggaagtgtcttcacataaaacctacacagaagcattcagagaaacatttttatgatgtgtacattcatctcacagagttgaacttttcttttgattgagcagttttgaaagactcttttagtagaatctgcaagtgaatatttggtgcctcagaggccaattgtgtaaaaggaaatatcttcacataaaaactacacagaagcattctgagaaacctctttgtgatgtgtgcattcatctcacagagttgaaccttgcttttcattaagcagtttggaaacactatttttgtagagtctgcaagtggatatttgaagcgctttgagaactattgtggaataggatatatcttcaaatgaaaattacacacaataattctgagaaacttctttgtgatgtgtgcattcatctcaaagagttgaacctttcttttgaatgagcagtttggaaaaaatctttttgtacattctgcaaatggatatttggagcactttttggcctattatggaaaaggaaatatcttcatgtaaaaactacatagaagcattctgagaaacttctttgcgatgtgtgcattcatctcacagagttgaacctttcttttgattgattagtttggaaacactctttttgtagaatctgtaagtggatatttggattgctttgaaggttatggtggaaaaggaaatatcttcacataaaaactacacagaagcattccgagaatcttctttgtgatgcttgcattcaacacacagagttgaaactttcttttgattgagcagtttggaaacacactttttgtagaatctgcaagtggatatttggagccctttgatgcccatttcagaataggaaataccttcacattaaaactacacagaagcattctgagaaacttctttgtgatgtgtgcatttatctcacatagttgaacctatcttttgattgagcagttttgaaactctctttttgtagaatctgcaagtggatatatggagcccttttaggcctatggtggaaaaggaaatatcttcacataaaaactacacagaagcattctgagaaacttcattgtgatgtgtgcattcatatcacagagttgaacctttcctttgattgggcagttttttattttattattattgtgctttaagttttagggtaaatgtgcacagtgtgcaggttatttacatatgtatacatgtaactaacatatgtatacatatatacaacgctggtgtgttgctcccattaactcgtcatttagaattaggtatatctccaacagctatccctcccccctccctccaccccagaactgtccccagagtgtgatgttccctttcctgtgtccatgtcttttcattgttcaattccccccactgagtgagaacatgcgatgtttgggtttttgtccttctgatagtttactgagtatgatgatttcctatttcatccatgtccctagaaaggacatgaactcatcattttttatggctgcgtagtattccacggtatagatgtgccacattttcttaatccagtctatcactgttggacttttgggttggctacaagtctttgtgttttgaaacactctttttgaagaatctgcaagtggatatttggagagttttgaggcctattgtggaaaaggaaatatcttcatattaaaactacacagaagcattctgagaaacttctttgtgatgtgggcattcatccaatacagttgaacttttcttttgattgagcagttttgaaaaactttttttgtagaatctacaagtggatatttggagagctttgaggcctattgtggaaaaggaattatcttcacttaaaaactacacagaagcattctgagaaacttctttgcaatgttcacattcatctcacagagttgaactttcgatttgactgagcatttttgaaacactctttttgtagaaactgcaagtggatatttggaccgctttgaggcctattgaggaaaatgaaatatcttcacataaaaactacacagaagcattctgagaaacttatttgtgatgtgtgcattcaactcacagagttaaatttatcttttcattgagcagctttgaaactttctatttgtagcatctgcaagtggataattggagtgctttgaggcctattgtggaaaagaaaatatgttcatattaaagctacacagaagcattctgagaatcttctttgcgatgtgtgcattcatctcccagagttgaacttttcttttgattgagcagttttgaaacactctatttgtagaatctgcaagtggatatttggagtgctttgaggcctattatggaaaagtaaatatcttcacataaaaactacacagatgcattctgggaaatttctttgcgatttgtgcacccatctcacagacttgaaatttcttttgattgagcagtttggaaacactctttttgtagaatctgcaagtggatatttggagtgctttgaggcctattatggaaaagtaaatatcttcacataaaaactacacagatgcattctgggaaatttctttgtgatttgtgcacccatctcacagacttgaaatttcttttgattgagcagtttggaaacactctttttgtagaatctgcaattggatatttggagtgcttggaggcatttagtggaaaaagaaaaaacttcacataaaaactagatggaagcgttctcagaaactactttatgatgtgtgtgttcaactcacagagttgaacatttcttttgatggagcagcttggaaacactcttcttgtagtatctacaaaggatatttggagcacttggaggcctgcagctgaaaaggaaataatttcacataaacactagacagaagcattctgagaaacttctttgtgatgtgtgcatttatctcacagagttgaactgttcttttgcttgatcagttttgaaacactcttcctgtagtatctgcaagtggatattgggagcactttgtggcctattgtggaaaagaaaatatcttcacataaaaactacacagaagcactctgagaaacttcttgaacctatctattgattgagcagttttgaaattctctttttatagaatctgcatttggatgtttgaaggaccttgtggctattggtagaaaaggaaatatcttcacacaaaaactacacagaagcattcagagaaactattttgtgatgcgtgcattgatctcacagagtttaatctttcttttaattgagcggctttcaaaaactctttttgtagaatctgcaagtggatatttcgggcgctttcaggcctattgtggaaaaggaaatattttcacataaaaactacaccaaagcatccttagaaacttctttgggatgtttgcctttatgtcacagagttgaacctttcttttgattgagcagttttgaaacacactttttgtagaatcttcaaggagatagttggagcccttttcggccaatggtggaaaaggaaatatcttcatataaaaactacacagaagcattctgagaaactactttgaaacgagggcattcatctcaccgagttgaaaatttctttgggttgagcagttttgaacgactcattttgtagtatctgcaagggcatatttctagtattttttggcctattgtggaaaatgaaataccttcccataaaaacaacacagaagcattctgagaatttttttgtgatgtgtgcattcatctcacagagttgaaaatttctttgattgagcagttttaaaatactctttctatggaatctgcgagtggatatttggagcgctttaaagccttttgtgtaaaaggaaatatcttcacataaaaactacacagaagcattctgagaaacttctttgtgatgtgtgcattcatctcaccgagttgaacctttcttttcattgagcagtttggaaactctctttttgtagagtatgcaagtcgatttttggagcaatttgtggcgtatggtggaaaagaaaatatcttcacataatatatacatggaagcattctgagaaacttctttgtgatgtgtgcattcaactcaaagagttgaacctatgtttgagtagttttaaaactctctttttctagaatttgcaagtggatatttggagccatttgtggcctgtggtggaaaaggaaatatcttcacataaaaactacacagaagctttctgagaaacttccttgagatgtacgcattcatctcacagagttgaacatttcttttgattgagcagttttgaaacactctttttgtagaatctgcatgtcgatgtttggagtgccttgaggtctgttgtggaaaaggaagtatcttcatatcaaaactacacagaagcattctgagaaacttctttgtgatgcatgtattcttctcacaaggttgaacctctctcttgattgagcgattttgaaacactccttttgtagaatctgtaactggatatttggagtgctttgaggcctattaaggaaaaggaaatatcttcacataaaaactgcacagaaacattctgagaaacttctttgtgatgcgtgccttcatctcaaggagttgaacttttcttttgattgagcagtttggaaacacactttttgtataatctgcaagtgggtatttggaaaactttgaggcctattgtggaaaaggaaatatcttcacataaaaactacacagaagcattctgagtaacttctttgtgatgtgtgcattcaactcacagagttgaacctcccttttttggggggcagttgtgaaactctctttttgtagaatatgcaagtggatatttggagctctttgaggcctgttgtggaaaaggaaatatcttcacataaatactacgtggaagcattctgagaaacttctttgcaatgtgtgcattcatctcacagagttgaacggttattttgattgagcaatttggaaacacacattttgtggaatatgcaagtggatatttggagcgctttgaggtctgtggtgcaaaagggaatatcttcacataaaaactacagagaagcattcttagaaacttctttgtgatttgtgcattcatctcacagaggtgaacctttctttttattgagcagttttgaaactctctttttctaggatctgcaagtgcatatttggagtgctttgagctcttttttggaaaagggaatatcttcacataaaaactacacagaagcattctgagaaacttctttgtgatgtgttcattcatctcacagagttgaacctttattttgattgagcagtattgaaacaatctttttgtagaatctgaaagtgaatatttggaatgctttaaggcctaatgtggaaaaggaaatatcttcatataaaaagtgcacagaagcattctgagaaacttctctgtgacgcgtgcattcatctcaaagagttgaaactttctttttattgatcagtgttgaaacactgtttttgtagaatctgtaagtggatatttggagcgctttgaggcctaatgtggtaaagtaaatattttcacataaaagctacacagaagcattctgagaaacttctttgtgatgtgtgcattcatctcaaagagttgaagctttcttttgattgactagttttgaaacactctttttgtagaatctgcaagtggatatttggagcgcttttaggcctatcgtggtaaaggaaatatcttcacataaaaacaacacagaagcattctgagaaacttcttcatgatgtgtgcattcatcacatggaattaaacctttctgttgattgagcacatttgaaacacactttttgcagaatctgcaagtggatatttggaacgctttggcgcctcctgtggaaaaggaaatatcttcatataaaaagtacacagaagcattctgagaaactactttgtgatgcgtgccttcatctcacagagtggaacctttcttttgattgagcagttttgaaacactctttttgtagaatctgcaaatggataattagacctctttgaggccttttgtggaaaaatgaatatcttcacataaaaactacacagaagcattctgagaaacttctttatgatgtgtgcattcaattcacggagttgaacctatcttttgattgaggggttttgaaactctctttttgtagaatctgcaactggatatttagagccctttgaagccaatgatagaaaaggaaatatcttcatataaaaactacacagaggcattctgagaaacttcattgttatgtgtgcaatcatttcacagagtttaacgtttcctttgatagagcagttgtgaaacactctttttgtagcatctgcaagaggatatttggagcgctttgaggcctattgtggtaaaataattatcttcaaataaagctacacagaagtattctgagaaacttcttcgtgatttgtgcattcatctcacagagttgaacatttcttactattgagcagttttgaatcacactttttgcagaatctgcaagtgcatatttggagagctttggggcccatggtggaaaaggaaatatcttcatataaaaactacacagaagtattctgagaaacttctttgtgaagtgtgcattaatctcacagagttgaaccttacttttgattgagcagttgggaaacacactttttgtataatctgcaactggatatttggaacgctttgaggcctcttgcggaaaaggaaatatcttcatgtaaaaactacacagagcattctgagaaatttttttgcgaagtgtgcattcatttcacagagttgaaccttacatttgattgagcagtttggaaacactctttttttggaaactgcaagtggatatttgaagcgctttcacatccatggtgcaaaagggactatcttcacataaaaactacacagaatcattctgagaaacttctttgtgatgtgtgcattcaactcacagagttaaacttttcttttgattgagcagtttggaaacatcctttttgtagaatctgcatgtggatatttgggacgctatgaggcctactgtggaaaaggaaatatctttttgtaaaatctacagagaagcattctgagaaacttcttgtcatgcgtgcattcatctcacagatttgaagctttcttttgattgagcagtgtggaaaccctctttttgtagaatctgcaagtggatatttggagcgctttgaggtctattctggaaaaggaagtatcttcacataaaaactacacagaatcattctgagaaacttcttaaagatctgtgcattcatctcacagagttgaacatatcttttaattgtgcagttcaagaactctctttttgtagaatctgtaagtggatacttagagagctctgagtcttgtggtggaaaaggaaatatcttaacttaataatgacacaaaatcattttgagaaaattcttttgatgtgtgcattcaactcacagatttgagcctatcttttgattgagcacttctgaaactctctttttgtagaatctgaatgtggatatctggagccctatgcggtctgtggtagaaaaagaaacatcttcacataaaaactacacggacgaattctgaaaaacttctttgtgatgtgtgcattcatctcacagagttgaaccttccttttgattgaacagttttgaaacaatctttttgtagaatctgcaagtggatatttggaacgctttgaggccaattgtggaaaaggaaatatcttcatataaaaactgcacagaattattctgagaaactactttttgatgtgtgcattcaactcacatagttgaacctactttttgatttagcagttttgaaacactctttttgtagaatctgcaaatgtatatttagagtcatttgtggactatggtggaaaatgaaatatcttcacataaaaactacacagaagcattctgagaaacttctttgtgatgcttgcattcaacacacagagttgaaactttcttttgattgaggaattttgaaacactctttttgtagaatctgaaagtggatatttggagtgctttgtggcctaaggtggaaaaggaaatatcttcacataaaaactacaaagaatcattctgagaaacttctttgtgatgtgtgcattcatctcacagagttgaaacttccttttgattgagcagttttgaaactctgtttttgtggaatctgcaactggatatttggagccccttgcagcctatggtggagaaggaaatatcttcaaataaaaactacacagaagcattctgataaacttctttgtgatgtgtgcattcttctcacaggattgaacctctctcttgactgagcagttttgaaacactctatctggagaatctgcacgtggatattggaagcgctttgaggcatattgtggaaaatgtaatatcttcacataaaaactacacagaagcattgtgggaaacatctttgtgatgtgtgcattcatctcatagagtggaacctttcttttgattgagttgttttgaaacactctttttgtacagtctgcaagtggatatttggagggctctgaggcctgtcgtggaaaaggaaatgtcttcacagaaaaactgcacagaagcattctgagaaacttctacaccgtgagtgcattcatctcacagagttgaacttatcttttgatagagcagtttttatactctcttttggtagaatctgcaagtggataattggagcctttgtgggctacattggaaaaggaaatatcttccaatataaactacacagaaacattctgaaaaaattcttcgtgatgtgtgtattcatctcacagagttgaacctttctttgatttagaagttttgaaacactctttctttagaatctccaagtggatatttggagcgctttgcggcctattgtggaaaaggaaatatcttcccataaaaaatacacagaagcattctgaggaatatcattgtgatgtgggcattcatctcacagagttgagcgtttcgtttgattgagcaggtttgaaatactctttttgtagagtttgcaagtggatatttggagcactttgagggttacagtggaaaaggaaatatcttcaaataaaaactacacagaagcattctgaggaactaatttgtgatgtgcacattcaactcacagaatggaacctttctttggattgagcagctttggaacactctttttgtagaatctacaaaatggatatttggagcgctttaaggccttttgtcgaaaaggaaatatcttcacataaaacctgcacagaagtattctcagaaacttctttctgatgtgtgcattcatctcacagagttgaacctttcttttgattgagcagttttgaaacactctttttgtagaatctgcaagttttatttggagcactttgatgcctgtggtggaaaagggtatatcttcacataaaattacacagaagcgttctgagaaacttctttgtgatgtgtgcattcgactcacagagttgaacctatcttttgattgagcaggtttgaaactctctttttgtagaatctccaagtggatattttgagcctttgtggcctatggtggaaaaggaaatatcttccaataaaaactaaacagaagcattctgagaaacttgtttatgatgtgtgcattcacctcaccgacttgaatctttctttggattgagcagctttgaaaaactatttttgtagaatctgcaagtgaatatttgagcactttgattcctacggtggaaaatgaaacatcttcacatgaaaactagacagaagcattctgagaaacttctatgtgatgtgtgcattccactgacagagttgaaactatcttttgatagtgcagtattgaaactctccttttgtagaatctgcaagtggaaatttggtagacctttgcagccaatggtggaaaagagaatatcttcacagaaaaattacatagaagtattctgagaaacttctttgtgatgtgtgcaatcatctcacagagttgaacttttcttttgattgagcagttttgaaatattcgttttgtagaatctgcatgtgaatatttggagcgctttgaggcctatgttggaaaatgaaatatcttcataaaaaaattacatggagacattctaagaaacttctttgtgatgtgtgcattcaactgacagagctgaacttatcttttgatagagcagtttctaaactctttttatataatctgcaattggatatatggagcccttagaggcctgtggtggaaaagaaaatatcttcacataaaaactacacagaagaattctgagaaacttctttgtgatgttgcattcatgtcacagagttgaacctttcttttgattgagcagttagcaaacactctttttttagaatctgcaagtggctattttgagcgccttgaggcctattgtggaaaatgaaatatcttcacataaaaactacacagaagcattctgagaaacttctttgtgatgtgtgtattcacctcacagtgttgacactgtcttttgattaagcaagtttgaaatactcttttcgtagaatctgcaaatgaacgttttgagcgctttgaggcttatggtggaaaaggaaacatcttcacataaaaattacacaaaattcttctgagaaacttcattgtgatttgtgcattcaactcacagagttgaccttctcttgtgatagagcagttttcactctctttttctataatctgaaagtggatatttggagccctttgaggcctattgtggaatatgaaatatcttcatataaaaaccacacagaagcattctgagaaacatctttgtgatgtgtgcattcaactcagagagttgaacctttcttttgacagagcagttttgaaactctctttttgtagaatctgcaagtggttatttggagccatgtcctgccaatggtggaaaaggaaatatcttcccataaatactacacagaagcattctgagaaacttcattgtgatgcgtgcattcatcttaaagaattgaacctatcttttgatataacagttttgaaacactctttttgtagaatctgcaagtggataattggagccctttgaggtctatggtggaaaaggaaatatcttcccataaaaattacacagaagcattctgaggaacatctttgtgatgtgggcattcatctcacagagttgaaactttcttttgattgagcagttttgaaacattctttttgtagaatctgcaagtggatatttggagcactttgggtcctatggtggaaaaggaaatgtcttcatataaaaactgcacagaagcattctgacaaacacttttgtgatgtgtgtattcaattcgcagagttcaacctgtcttatgatagaacagttttgaaactctccttttgtagagtctgcaaccgtatatttggagccctttgtggacgatgttggaaaaggaaatatcttccataaaaattacacagcagcattctgaggaacttctttgtgatgtgtgcattcatctacgaaagttgaacctttcatttgattgagcagttttgaaacactctttttgtagatctgcaagtggatatttggagcgatttgaggcctgttgtgggaaaggaaatatcttcacataaaatctacactgaaacattcttacaaacatctttttgatgtgtccattcatcacacagagtttaacatttcttttgattgtacagtttggatatacactttttgtagaatctgcaactggatatttggagagctttgaggccttttgtcgaaaagaaaatatcttcacatgaaatctgcacagaagtattctcagaaacttctttctgatgtgtccattcatctcacagagttgaacttttcttttgattgaacagttttgaaacactctttttgtagaatctgcaagttttatttggagcactttgatacctacagtggaaaaggatatatcttcacattaaaaactacacagaagcattctgagaaacttctttgtggtgtgtgtattcatctcacagagttgaacctatcttttgattgagcagatttgaaactctctttttgtagaatctccaagtggatattttgagcctttgtggcctatggttgaaaaggtaatatcttccaataaaaactacaaagaagctttctgagaatcttgtttatgatatgtgcatttacctcacagatttgaacctttctttggattaagcagttttgaaaaactcttttgtagaatctgcaagtggatatttaagcactttgattcctatggtggaaaaggaaatatcttcacataaaaactagacagaagcattctgagaaacttctatgtactgtgtgcattccacacacagagtagaaactatcttttgatagtacattattgaaattctccttttgtagaatctgcaagtggatatttggagctctttgaggccaatgatggaaaaggatcttccaataaaaacaacaaagaagcattctgagacacttccttgtgaggtgtgcgttcatacccagagttgaacttttcctttaattgagcagtttggaacacctttttgtagaatctacaagtggatatttgtagcactttgagggctatgttggaaaagaaaatatcttcacataaaaactacacagaaaccttctgagaaacttctttgtgatgtgtgcattcatcacatggagttgaacctttcttttgattgaacagtttggaaacactcttttcatagaatctgcaagtggatatttggagtgctttgaggtgtattgtggaaaaggatatatcttcacataaaaactagacagaagcattctcagaaactgctttgtgatgtgtgcattcacctcacagactggaaccgttcttttgatagagcagttttgacacagtcttttagtagaatctggaagtgaatagttggatcccttgaaggcctattgtggaaaaggaaatatcttcaaatgaaaactacacagaagcattctgagaaaccactttgtgatgtgtgcaacaactcacagagttgaacctatcttttgatagagcagttttgaaactcactttttgtagaatccccaagtgtatatttggaaccctttgcgtcctatggtggaaaaggaaatatcttcccataaaaactacacagaagcattctcagaaacttctttgtgatgtgtgcattcaactcaaagagttgaaactatctttttatagagcagttttgaaactctctttttgaacaatctgcaagtggatatttggagtgctttgaggccttttgtggaaaaggaaatatcttcacataaaaactatacagaagcattttcagaaaattctttgtggtgtgagcattgatctcacagagttgaaccattttttgattgagcactttggaaacactcctatagtagaatctgcaagtggatatttgcagcccttggagggcaattgtggaaaaggaaatatcttcacataaaacctacacagaagcattctcagaaacttctttgtgatgtgtgcattaaactcacagtgttgaaccaatcttttgattgagcctatcttttgattgagcagttttgaaactcttttttgtataatctgcaagtggatatttggagccctttgtggcttatggtggaaaaggaaatatctgcaaatagaactacacagaagctttctgagaattttttttgtgatgtgtgcattcatcttacagagttgaaactttcttttcattgagcagttttgaaacactcttttcataaaatctgcaagtggatatttggagtccttggaggcctattgcggaaaaggaaatatcttcacataaaagctacacagaagcagtctgagaaattactttttgatgtgtgcattcatctcacagagttgaaccttccttggattgagcagttttgaaacactctttctgtagaatatgcaagtggatatttggagtgcttttaggcctattgtggtaaaggaaatatcttcaaataaaaactacacagaagcattctgagaaacttctttgtgatgtgtgcattcaactcacagagttgaacctatcttttgatagagcagttatgaaactcgcttttgtagaatctgcaagtcgatatttgtagccctttgcagtttattgtggaaaaggaaatattttcacataaacactacacagaagccttctgagaaacttctttgtgatgtgcattcatttcacagcgttgaacctctcttttgattgagcagtttggaaacacttttttggagaatctgcaagtggatatttgtagcgctttgaggagtattgtggaaaaggaaatatcttcacataaaaactacaaagaagcattctgagaaagttctttgtgatgtgtgcattcacctcacagagctgaacttttcttttgcttgagcagtttggaaacactcttttagtagaatcgggaagtggatagatttagctctaggaggcctattgtggaaacggaaatatctgcacatgaaaactacacagaagcattctgagaaaccactttgtgttgtgtgcaatcaagtcacacagttgaacctatcttttgatagagcagttttgaaactctctttttgtagaatctccaagtggatactggaacccttagcatcctatggaggaaaaggaaatatcttcacataaaaacttcacagaagcattctgagaaacttctttgtgatgtgtgcattcaactcacagagttgaagctatcttttgatagagcagttttgaaactctctttttgcagaatctgcaagtggatatttggagcccttggtggcctatggtggaaaagcaaatatcttcacctaaaaactacacagaaggattctgagtatctactttgtgatgtgggcattcatctcacagtgttgaaactctcctttgattgagcagtttggaaaaactctttttgtagaatctgcaagtggatattaggagcgctttgaggcctattgtggaaagggaaatatcttcacataaaaaatacacagaagcattattagcaacttctttgtgatgtgcgcattcatctcacagaattgatccttttttgatcgagaagtttggaaacactcctatagtagaatctgcaagtggatatttggagcccttggaggcctattgtggaaaaggaaatatcatcacataaaacctacgcagaagcattatgagaaacttctttgtgaattgtgcatccatctcacaccgttgaaactttcttttgatagagcagttttgaaacactattttcataggatctgcaagtggatattttgagcacttttgggcctatggtggaaaaggaaatatcttcacataagaacaacacagaagcattctgataaacttctttgtgattcgtgcattcatctcaccggtttgaacctatattttgattgtacagttttgaaacactcttattatagactctgcaagtggatatttgaagcactttgaggcctgttgtggaaaacgaaataacttctaataaaaactacacagaagcattctgagaaacttctttgtgatgtatgcattcaacttacagagttgaacctatcatttgattgaagacttctgaatctctctttttgtaaaatctgcaaatggatatttggagccctttgcagcctattttggaaaaggaaatatcttcacataaaaactacacagaagcattatgagaaacttctttgtgacgtgtgcattcatctcacagaggtgaacctttctttggattgagcagttttgaaacactttttttatagaatttgcaagtggataattgaagcactttgaggcctattgtggaaaggaaatatcttcacttaaaaattgcacagaagcattctgagaaacttctttgtgatgtgtgcattcatctcacagagttgaacctttcttttcattgagcagtatggaaacaatcattttgtagaatctgcaagtggatatttggagcgctttgagacctattgtggaaaatgaagtttcttcacaaaaaattacacagaagcattgtgaaaaactactttgtgatgtgtgcattcatctcacagagctgaacctatcttttgatagagcagttttgaaactctactttgtagaatctgcaagtggatatttgtagccctttgtggcctatgttggaaaaggaaatgtattcacataaaaactacaccaaagcattctgagaaacttcttttgtgctatgtggattcatctcacagagttcagcctttcctttgattgagcagttttgaaacacactttttgtagaatatccaggtggatatctggagcactttctggccttttgtggaaaaggaaatatcttcacataaaaactacatagaagcattattggaaacttctttgtgatgtgtgcattcatctcactgtgttgaacctttcttttgattgagcaattttgaaacactgtttttgtagaatctgcaagtggttatttagagagcttggaggcctattgtggaaaaggaaatatcttcacataaaaactgcacagaagcattctgagaaacttctttctgacgtgtgcattcaagtcacaatgttgaacctatcttctcatggagcagttttgaaactctctttttgtagaatcttcaagttgttttttggagccctttgcagcttatggtggcaaaggaaatatctccatataaaaactacacagaagcattctgagaaacttctttgtgatgtgtgcattcatttcacagagttgaacgttttttgattcagcagttttgaaacactcattttttagaatatgcaagtggatatatggagcgttttgaggccttttgtggaaagggaagtatcttcacaaaaaaactacgcagaggcattctgagaaatatcttgtgaagtgtgcattcatctcatagagttgaactttgttttcatcgagcagttttgaaacactctttttgtagaatctgcaagtggatatttgtagcattttgaggcctattgttgaaaatgaaatatcttcacataaaaactacacggtgtaaggaattgatccagtttcagctttctacatatggctagcaagtattcccagcaccatttattaaatagggaatcctttccccatttcttgtttttcttaggtttgtcaatgatcagatagttgtatgaatgtaacattatttctgagggctctgttctgttccattgatctatatctctgttttggtaccagtatcatgctgctttgtagtatagtatgtagccttgtagtatagtttgacgtcaggtagcgtgatggctccagctttgttgttttggcttaggattgatttggtgatgcgggctcttttttgattccatatgaactttaaagtagttttttccaattctgtgatgtaagtcattggtagcttgatgaggatggcattgaatcaataaattaccttgggcaatatggccattttcatgatattgattcttcctacccatgagcatggaatgttcttcgatttggttgtatcctcttttatttcattgagcagtgttttgtagtactccttgaagaggtccttcatgtcccttataagttggattcctaagtattctattctctttgaagcaattgtgaatgggagttcactcatgatttggttctctgtctgtctgtcactggtgtataagaatgcttgtgatttttgtacattgattttgtatcctgagacctagctgaaattgcttatcagcttaaggagatttccggctgagacaatggggttttctagatatacaatcatgtcatctgcaaacagggacaatttgacttcctcttttcctaattgaatacactttatttccttctcctgcctaattgccctggccagaacttccaatactatgttgaataggagtggtgagagagggcatccctgtcttgtgccaattttcaaagggaatgcttctagtttttgcccattcagtatgatattggctgtgggtttgtcatagatagcttttattattttgagatacgtcccatcaatacctaatttattgagagtttttagcatgcagagttgttgaattttgtcaaaggccttttctgcatctattgagataatcatgtggttttcatctttggttctgtttacatgctggattgcatttattgatttgcatatattgaaccagccttgcatcccagggatgaagtccacttgatcatggtggataagccttttgatgtgctgctggattgggtttgccagaattttatagaggatttttgcatcaatgttcatcaaggatatttgtctaaaattatcttttttgattgtatctctgcccagctttggtatcaggatgatgctggcctcataaaatgagttagggaggattccctcttttgctattgattggaatagtttcagaaggaatgataccagttcctccttgtacctctggtagaattcagctgtgaatccatctggtcttgggctctttttggttggtaagctatttattattgcacaatttcagatcctgttattggtatattcagagagtcaacttcttcctggtttagtcttgggacagtgtatgtgtcaaggaatttattcatttcttctagattttctagtttaattctgtagaagtgtttgtagtattctctgatggtagtttgtatttctgtgggattggtgattaaagacttaagtattagacctagaaccataaaaaccctagaagaaaacctagacattacaattcatgacataggcatgggcaaggacttcatgtctaaaacaccaaaagcaatggcaacaaaatccaaaagtaacaaatgggatctaattaaactaaagagcttctgagcaacaaaagagactaccatcagagtgaacaggcaacctaaagaatgggagaaaatttttgtaacctacttatctgacaaagggctgatatccagaatctacaatgaactcaaacaaatttacaagaaaaaaacaaacaaccccatcaaaattgggtgaaggacatgaacagacacttctcaaaagaagacatttatgcagccaacaaacacatgaagaaatcctcaccatcactggccatcagagaaatgcaaatcaaaaacagaatgagataccatctcacaccagttagaatggcaatcattaaaatgtcaggaaacaagaggtgctggagcggatgtggacaaataggaacacttttacactgttggtgggtctgtaaactagttcaacctttgtggaagtcagtgtgggattcttcagggatctagaaccagaaataccatttgacacagccatcccattactgggtatatacccaaaggactataaaccatgctgctatgaagacacatgcacaagtatgtttattgcaggactattcacaatagcaaagacttggaaccaacacaaatgtccaaaaatgatagactggattaagaaaatgtggcaaatatacacaatggaatactatgcagccataaaaaatgatgagttcatgtcctttgtagggacatggatgaaattgggaatcatcattctcagtaaactatcacaagtacaaaaaacagaacaccgcatattctcactcataggtgtgaattgaataatgagaacacatggacacaggaaggggaacatcacactcaggactgttgtggagtcaggggttgggggagggatagctttaggagatatagctaatgctaaatgacgagttaatgggtgcaacacaccagcatggcactggtatacatatgtaactaacctgcacatggtgcacaggtactctaaaacttaaagtataataacaattaaaaaaacacacaaaaagagattctcacacacacaaacacacacacaaatacatggaagctttctgagaaacttctttgtgatgtgtgcattcatctgacagagttgaacctttcttttgattcagcactttggaaacactctttttgtagaatctgcaagtggatatttggagtgatatgaggcctatggtggaaaaggaaatgtcttcacataaaaactacacagaagcattctgagaagctactttgtgatgtgtgcattcatctcacagacctaaagctttcttttgattgagcattttgaaacattctgttgggagaatctgcaagtggatatttggagcgctttgaggattattgtggaaaaggaaatatcttcacataaaaattacacagaggcattctgagaagcttttttgtgatgtgtgcattcatctcacagagttgaaattttcttttgattgagcagttttgaaacattctctttgtagaatctgaaagtggatatttggagtgctttgaggcctattgtggaaaaggaaatatattcacataaaaactacaaggaaacattctgagaaacttctttttgttgtgtgcattcatctcacagatttgaacttttcttttgcttgagcagtttggaaacactctttttgtagaatctgcaaggggatatttggagcactttgaggcctattgagaaaaaggaaatatcttcacaaaaaaccacacagaagcattctgagaaacttctttgtgatgtgtgcattcaactcacagtgttgaacctatcttttcaatgagcacttttgaaactcccttttttagaatccagaagtggatatttggagccttttgtggcctatgttggaaaaggaaatatcttcacatgaaaactacacagaagcattctgagaaacttctttgtgatgtgtgcattcacctcacagggttgaacctatattatgattaagcagtttggaaacactctttttgtagaatctgcaagtggatatttggagcgctttgatgcctacggtggaaaaggaaatgtcttcacataaaaactacacagaagcattctgagaagctactttgtgatgtgtgcattcatctcacagagctaaacctttcttttgattgagcagttttgacacactctgtttgtagaatctgcaagtgtatatttggagcactttgaggcctattgtggaaaaggaaatatcttcacataaaagctacaaagaggcattctgagaagcttttttctgacgtgtgcattcatctcacagagtcgaaactttcttttgattgagcagtttggaaacattctgtttgtagaatctgaaagtggatatttggggcgctttgaggcctattgtggaaaaggaaatatattcaagtgaaaactacacagaagcattctgagaaacttctttttgttgtgtgcattcatttcacagagttgaacctttcttttgcttgagcagtttggaaaaactctttttgtagaatctgcaagaggatatttggagcactttgaggcctattgtgaaaaaggaaatatcttctaaaaaaactatacagaagcattccgagaaacttctttgtgatgtgtgcattcaaatcagagtgttgaacctatcttttgaatgaacacttttgaaactcccttttgttgaatctacaagtggatatttggaaccctttgtggcctatgttggaaaaggaaatatcttcacataaaaacaacaaagaagcatttggagaaacttctttaagatgtgttcatctcacagatttgaaacattctttttattgagcagttttgaaacactcttcttacagtatctgcaagtggatatttggagccccttgagacctattgtggaaacggaaatatcttcacataagaactacacagaagcatcctgagaaacttctttgtgatgtgtgcatttatctcacagagttgaacctgtcttttcattgagcagttttggaacactctatttgtagaatctgcaagtgcatattaggagtgctttgaggcttattgtggaaaaggaaataccttcacataaaaactacacagaaacatcctcagaaacttctttagatgtgtgcattcatctcacagagttgaacctttcttttcgttgagcagtttggaaaaactcttttagtagaatctgcaaatggatatttagagcccttggaagcctattgtggaaaaggaaatatcttcacataaaaagtccacagaagcattctgagaaacttctttgtgacgtgtgcattcatctcacaaagttgaacgtttttttttttttttattgagcagcttggaaacactctttttgtgggatctccatgtggatatttggagcactttgaggcctatggtggaaaaggaaatatcttcgcatgaaaactacacagaagcattctgagaaacttctttgtgatgtctgcattcatctcacagagttgaatctttcttttgatggagcagttttgaaacactctttttgtagaatctgcaagtggatatttggagcgctttgaggcctaatgtgaagaaggaaatatcttcacataaaaactgcacagaagcattctgagaaacttctttatgatgtgtgcattcagctcacagagttgaacctatctttttaaagagcagttttgaaactctcctttcgtgtaatcttcaagtggatatttgaagccctttgcagcctatggtggaaaaggaaatatcttcacataaaaactacccagaagcattctgagaaacttctttctgatgtgtgcattccactcacagagttgaacctatcttttgattgagcagttttaaaactctctttttgtagtatctgcaagtggatatttggagtgctttgaggcttatggtggaaaacgaaatatcttcacataaaaacaacacagaagcattctcagaatctcctttgcgatgggtgcattttcgtcacagagttgaacttttcttttgactgagaagtttggaaacactctttttgtagaatatgaaagtggatttttggagtgctttaaggcctatggtggaaaaggaaacatcttcacataaaaactacacagaagcattctgagaaacttatttgtgatgtgtgcattcatttcacagtgataaacctttcttttgattaagcagttttgaaacactctttttgtagtttctgcaagtggatatatggagagatttgaggcctgttgtggaaaaggaaatatcttcacataataaccagacagaagcattctgagaaacttctttgtgatgtgtgtattcacctcacagaatagaacattgcttttgattaagcagttttgaaaccctctttttgtacaatctgcaagtggatgcaatggcatccgcgattgcccaggcttgcttaagtaaataaagcagccggggagctagaactgggtgggcccaccatagctcaagaaggcctgcctgcctctgtaggctccacttctgggggcagggcacagacaaaccaaaagacagcagtaacctctgcagacttaaatgtccctgtctgacagctttgaagagagcatcggttctcccagcacacagctggatttctcagaatgggcagactgcctcctcaagtaggtccctgactcttgactcctgagcaccctaactgggaggcacccccaagcaggggcagactgacaccttacacggctgggtactcttctgagacaaaatttccagatgaacaatcagagagcagcatttgcggttcacgaaaatccgcttttctgcagccactgctggccaatgctgctgttacccagaaaaatagggtctggagtggacctccagcaaacttcaacacacctgcagctgagggtcctgtctgttagaaggaaaactaacaaacagaaaggacatccacaccaaaaacccatttgtacatcaacaacatcaaagacaaaagtagataaaaccacaaagatggggaaaaaacagagcagaaaaactggaaactctaaaaaccagagcacctctcctcctccaaaagaatgcagttcctcaccagcaacggaacaaagctggatggagaatgactttgacaacttgagagaagaaggttcggatgacgaaactactccgagctacagcaggaaattcaaaccaaaggcaaagaagttaaaaacattgaaaaaaatttagacgaatgtataactagaataaccaatatagagaaatgcttaaaggagctgatggagctgaaagccaaggctcgagaactacatgaaaaatgcagaaacctcaggagccgatgcaatcaactggaagaaagggtatcagtgatggaagatgaaatgaatgaaatgaaagcgagaagggaagtttagagaaataaaaagaaatgagcaaagcctccaagaaatatgggactatgtgaaaagaccaaatctacgtctgattggtgcacctgaaagtgatggggagaatggaatcaagttggaaaacactctgcaagatattatccaggacaacatccccaatctaacaaggcaggccaacattcagattcaggaaatacagagaacgccacaaagatactcctcgagaagaacaactccaagacgcataattgtcagattcagcaaagttgaaatgaaggaaaaaatgttaagggcagccagagagaaaggtagggttacccataaagggaagcacatcagactaacagtggatctctcagcagaaactctagaagccagaagagagtgagggtcaatattcaacattcttaaagaaaagaattttcaacccagaatttcatatccagccaaactaagcttcataagtgaaggagaaataaaatactttacagacaagcaaatgcagagagattttgtcaccaccaggcctgccctaaaagagctcttgaaggaagcactaaacatggaaaggaacaaccggttccagccactgcaaaatcattccaaattataaagaccttcgaggctaagaagaaactccattaactagtgagcaaaatatccagctaacatcataatgacaggatcaaattcacacataacaatattaactttaaatgtaaatggactaaatgccccaattaaaagacacagactggcaaattggataaggagtcaggacccatcagtgtgctgtattcaggaaacccatctcacgtgcagagacacacataggctcaaaataaaaggaaagaggaagatttaccaagcaaatggaaaacaaaaaaaggcagaggttgctatcctagtctctgataaaacagacttaaaccaacaaagatcaaaagagacaaagaaggccattaaataatggtaaagggatcaattcaacaagaagagctaactatcctaaatatatctgcacccaatacaggagcacccagattcataaagcaagtcctcagtgacctacaaagagacttagactcccacacaataataatgggagactttaacaccccactgtcaccattagacagatcaacgagacagaaagttaacaaggatacccaggaattgaactcagctatacactaagaggacctaagagacatctacagaactctccaccccaaatcaacagaatatacatttttttcagcaccacagcacacctattccaaaattgaccacgtagttggaaagaaagctctcctcaacaaatgtaaaaatcagaaattataacagactgtctctcagactgcaatgcaatcaaactagaactcaagattaagaaactcactcaaaaccgctcaactacatggaaactgaacaacctgctgctgaatgactactgggtacataacgaaatgaaggcagaaataaagatgttctttgaaaccaacgagaacaaagacacaacataccagaatctctgggacacattcaaaacagtgcgtagagggaaatttatagctctaaatgcccacaagagaaagcaggaaatatccaaaattgacaccctaagatcacaattaatagaactagaaaagcaagagaaaacacattcaaaagctagcagaagataagaaatagctaaaatcagagaacaactgaaagaaatagtgacataaaaaaccttcaaaaaattaatgaatccaggagctagttttttgaaaggatcaacaaattgatagactgctagcaagactaatgcagaaaaaaagagagaagaatcagatagatgcaataaaaaatgataaaggggatatgaccaccaatcccacagaaatataaactgccatcagagaatactacaaacacctctatgcaaataaactagaaaatctagaagaaatggataaattcctcaacacatacaccctcccaagagtaaaccaggaagaagttgaatctctgaatagaccaataagaggatctgaaattgtggcaataatcaatagcttaccaactaaacagggtccaggaccagacggattcacagccaaattctaccagaggtacaaggaggaactggtaccattccttctgaaactattccaatcaatagaaaaagagggaatcctgcctaactcattttatgaggccagcatcatcctgataccaaagccaggcagagacacaaccaaaaaggtgaattatagaccaatacccgtgatgaacattgatgcaaaaatcctctataaaatactggcaaaccgaatccagcagcacatcaaaaagcttatccaccatgatcaagtgggcttcatccctgggatgtaaggctggttcaatattcagaaatcaataaatgttatccagcatataaaccgaatcaaagacaaaaaccacatgattatctcaatagatgcagaaaaggcctttgacaaaattcaacaactctgcatgctaaaaactctcaataaattagatattgttgggacgtatctcaaaataataagagctatctatgacaaacccacagccaatatcatactgaatgggcaaaaactggaagcattccctttgaaaactggcacaagacagggatgccctctctcaccactcctattcaacatagtgttggaagttctggccagggcaattaggcaggagaaggaaataaagtgtattcaattaggaaaagaggaagtcaaattgtccctgtttgcagatgacatgattgtatatctagaaaatcccattgtctcagcccaaaatctccttaatctgataagcaatttcagctaagtctcaggatacaaaatcaatgtacaaaaatcacaagcactcttatacactagtgacagacaaacagagaaccaaatcatgagtgaactcccactcacaattgtttcaaagagaatgtgtttgctcttgcttttctaattcttttaattgtgatgttagggtgtcaattttggatctttcctgctttctcttgtgggcatttagtgctataaatttccctctacacactgctttgaatgtgtcccagagattctagtatgttgtggatacaaaattaatgtacaaaaatcacaagcattcttatacaccaataacagacaaacagagatccacatcatgagtgaactctcattctcaattgcttcaaagagaatgaaatacctaggaatccaacttacaagggatgtgaaggacatcttcaaggagaactgcaaactactgctcaatgaaataaaagaggatacaaagaaatggaagaacattccatgctcatgggtaggaagaagcaatatcgtgaaaatggccatactgcccaaggtaatttatcgattcaatgacatccccattaagctgccaatgactttcatcacagaattggaaaaaagtactttaaagttcatatggaaccaataaagagcctgcattgccaagtcaatcctaagccaaaagaataaacctggaagaatcacgctacctgacttcaaactatactacaaggctactgtaaccaaaactgcatggtactggtaacaaaccagagatatagctcaatggaacagaacagagccctcagaaataatgccgcatatctaaaacaatctgatatttgacaaacctgagaaaaaccagcaatggggaaattatttcctatttaataaatggtgctgggaaaactggctagccacatgtagaaaactgaaactggattccttccttacaccttatacaaaaatcaattcaagatggattaaagacttaaacgttagacctaaaaccataaaaaccctggaagaaaacctaggaattgccattcaggacataggcatgggcaaggacttcatgtctaaaacacgaaaagcaatggaaacaaaagccgaaattgacaaatggaacctaattaaattaaagagcttctgcacagcaaaagaacctaccatcagagtgaacaagcaacctacaaaatgggagaaaattttcgcaacctactcatcggacaaagggctaatatccagaatctacaatgaactcaaacaaatttacaggaaaaaaacaaacaaccccatcaaaaagtgagtgaaggacatgaacagacacttctcaaaagaagacatttatgcagccaagaaacacatgaaaaaatgctcaccatcactggccatcagagaaatgcaaatcaaaaccacaatgagataccatctcacaccagttagaatggcaatcattaaaaagtcaggaaacaacaggtgctggagaggatgtggagaaacaggaacacttttacactgttggtgggacagtaaactagctcaacccttgtggaaatcagggtggcaattccttaaggatctagaactagaaataccacttgacccagccatcccattattgggcatatacccaaaggattataaatcatgctgctataaaaacacatgcacacataagtttattgcagcactattcacaatagcaaagacttggaaccaacccaaatgtccaacaatgatagactggattaataaaatgtggcccatatacaccatggaatactatacagccataaaaaaggatgagctcatgtcctttgaagagacatggatgaatttggaaatcatcattctcagtaaacaattgcaaggacaaaatccaaacaccacatgttctcactcacaggtgggaattgaacaatgagaacacatggacacaggaaggggaacatcacactctggggactgttatggggtgggggaaggggggcgatagcattaggtgatatacctaatgctaaatgacgaattaatgggtgcagcacaccagcatggaacatatatacatatgtaactaacatgcacattgtgcacaagtaccctaaaacgtaaagtaaaataaaataaaaaataaaaaagaatgcttacaaactgctcaatccaaagtaagcttccactccttgagttgtatgcacacatcacaaaggagtttctcagaacgcttcttgctagtttttaggtgaggatatttccttttatactgtaggtttcaaagctctccaaatatccatttgcagattctacataaagaatgtttccatactgctcaagcaaaagaaaggttccactctgtgagttgaatgcacacatcacaaagaagtttctgagaatgattcagtctagtttttaggtgaagatatttccttttacatcataggcctcaaagcgcttgaaatatccacttgcagattctacaaaaagagtgtttcaaaacttcccaacgaaaagagttgctcaactgtgtgagatgaatgcacacatcaaaaaggagtttctcagaatgcttctgtcttgtttttatgtgaagatatttactttttcaccataggcatcaaatcgctccaaatatccacttgcagattctacagaaagagtgtttcaaaactgctcaatcaaaagaaaggttcaactctgtgagatgaatgcacgcatcacaaagaagtttctcagaatacctctgtctagtttttatgtgaagatatttccttttccaatataggccacaaagcgctccaaatatccacttgcagattctacaaaaagtgtgtttctcagaatgcttctgtctagttcttatatgaagataactccttttcctctatagaccaaaaagcactcaaaatatccttttggagatagtacaaaaagcctgtttccaaactgctcaatcaaaagaaagttttaactctgtgagttgaaagcatacatcacaaagaagtttcccagaatgcttctgctagtttttatgtgaagatatttcctttcccaatataggcctcaaacgctccaaatatctacttgaagatactagtaaaagagtgtttcaaaactgctcaatcaaaacaaaggttcaactctgtgagatgaatgcacacatcacaaagaagtttcttgcaatgcttctgtgtagtttttatgtgaatatatttcctattccacctgtggcctcatagtgctccaaatatccttttgcagataatacagaaagactctttccaaactactcaatcagagaaaagtttcaagtctgtgagttgaatgcgcacatcacaaagaagtttctcagaatgcttctgtctagtttttatgtgaagatatttccttttccaccagagccctcaaagggctccaaatatccacttgcagaatctacaaaatctgtggttcaaaactgctcaatcaaaagaaagtttcaactctgggagatgaatgtgcacatcacaaagatgtttcccagaatgcttctgtctagtttgtatgtgaagatattttcttttccactacaggctgcaaagctctccaaatatcccgttgaagattctaaaaaaagagtttttcaaaactgctaaatcaaaaaaatttcaaatctgtgagatgaatgcacacatcccaaattgtttctcagaatgcttctgtttagtttttacgtgaatatatttccttttccactacaggcctcaaataatttgaaatatccatttgcagatactacaaaaagactgttcccaaactgcttaatgaaaacaaatgttcaactgtgtgcgttgaatgcacacatcacaaagaagtttctcagaatgcttctgtcttgtttttatatgaagatttttccttttccatcataggcctcaattcgatctgaatatccatctgcacattctacaaaaacagtgtttcaaaactgctctatcaaaagaaaagttcaactctgtcaaatgaatgtacacatcaaaacgtagtttttctgaatgcttctgtctagtttttatgtgaagttatttccttttccaccataggccacaaagggctccaagtaaaaaattgcagattctataaaacgagtgtttgaaaactgctcaatcaaaagacaggttcaactctgtgtgatgaatgcacatatcacaaagtagtttcttacaatgcttctgtctagtatttatgcgaagatttttccttttccaccatatgcctcaaatcgctcctaatatccacttgcagattctacaaaaagagtgtttcaatagtgctcaatcaacagaatggttcagctctgggagatgaatgcacacatcccatagtagtttctcagaatgcttttgtctcgtttttatgtgaagatattcccgtttacactatagggctcaaaccgctccaaatatccatttgaagattctacaaaaagtgtttctgaaaactgctcaataaaaaaaagcttcaactctttgaaatgaatgcacacatcccaaataatttccaagaatgcatgtgtctagtttttatgttaagatatttccttttccaccataggcctcttagtgctccaattatccatttgcagatactgcaaaaagactgtttccaaactgctcaaaaaatgaaaagtacaactctgtgagttgaatacacacatcacaaagaagtttctcagaatgtttctgtctagtttttatgtgaagatatttccttttccaccatagtcctcatagtgctccaaatatccacttgcagattctacaaaaggagtgtttcaatactgctcaatcaaaagaaaggttcaactctgtgagatgaatgcacacatcaaaagaagttactcagaattcttctgactagattttatgtcaagatatttccttttccactataggcttcaaagcgcttcaaatatacatttgcagataatataaacagaatgtttccaaactgctgaatcaaaagaaaggtacaactcagtgagttgaatgcaaacatcacaaacaattttctcagaatgcttctgtctattttatatctgaagatatttccttttccattataggcctcaatacgctccaaatatccattcaaagatactacaaaaagactgtttccaacttgctcaatcaaaaaaacattgaactctgtgatttgaatgcacacatcacaaagtagtttctcaaaatgcttctgtctagtttttaggtgaagatgtttccttttccaccataggcctcaaatcactccaaatatcctcttgcagattccacaaaaagagtgtttgaaaaactgctcaatctaaagaaaggttcacctctttgagatgaatgtacacaacacaaagaagtttctcagaaagcatctgtgtagttttatgtgaagatatttccctttccactataggtctcaatgcgctccaaatgtccacttgcagatactacaaaaagtctgtttccaaactgcacaatcaaaagaaaagttcaactctgtgagttgaatgcccacatcacaaaaaagtttctcaggattgtgaagtctagtttttatgtgaagatattcctttttctactataagtcacagaacactccaaatagccacttgcagatcctacaaaaatagtgtatcaaaactgctcaatcaaaggaaagtatcaactctctaagatgaatgcacacataacaaagaagtttctcagaatgcttctgtttagtttttacgtgaagatttttccttttccacgataggcctcaaagcgctccaaatacccattttcagattctgctaaaataatctttcaaaactgctcaaggaaaagaaagtttcaaccctgtgagatgaatgcaaacgtcacaaagaagtttctcagaatgctactatctagtttctatatgaagatatttccttttccaccattggtctcaaagctctccaaatatccacttgcagattctacaaaaatagtgtttccaaactcctcaatgaaaagaaagtttcaagtctgtgggatgaatgcacacatcacaaagaagtttaacagaatgcttccatctagtttttatgtgaagacatttcattttccactgtaggcctcgatgtgctccaaatattcatttgtagatgctacaaaaagactggtaccaaactgttcaatcaaaagaaaagttgaactctctgagttgaatgcactcatctcaaggaattttctaagaatgcttgtgtctagtttttatgtgaagatatttcattttccactataggccacaaagtgctccaagtatccacttgcagattatacaaaaagagtgtttcaaaactgctcaaacaaaggaaatgttcacatctgtgagataaatggacacataacaaagaagttcttcagaatgattgtgtctattttttatttgaagatatttccttttccattataggctgcaaaacactccaaatatccatttgcagttaatataaaaagactgtttccatactgctgaatcaaaagaaatattcaactctctgagttgaatccaaacatcacaaagaattttctcagaatgtttctgtctagtttttatgtgaagatacttccttatcccctataggtctcattgcactccaaatatccatttgaagatagtataaaaaagacggtttccaaactgctcaatcaaaagaaaggttcacctctgttagttgaatgcacacatgggaaaaaagtttctaagaatgcttctgtgtagcttttatgtgaagatatttcctttccaccataggtctcaaagcgctccaaatatccacttgcaaattctacaaaaataatgtttcaaaactcctcaatcaaaagataggttcaactctgtgagttgaattcacacatcataaagaaatttctcacaatgcttccgtctagtttttatgtgaagatattttccaccacaggccgcaaatcactccaaacatctgcttgcagattcgacaaaaagagtgtttcaaaactgttcaatcaaaagaaagtttcaactttgtgaggtgaatgcacacatcaaaactaagtttctcagaatgtttctgtctagtttttatgtgaagagaattccttttccagtataagccacaatgcgattcaaatatccacctgcagatcctacaaaaagagtgttacagaactgctcaatcaaaagaaaaattcaaccctgtggagatgaattcacacatcacaaagatgtttctcagaatgcttctgtatagttgttaagtgaagagacttccttttccaccacaggcctcaaagcagtccaaaatccttttgcatgtagtaaaaaaagatggtttccaaacttcacaatcaaaagaaaggttcaactctgtgagatgaatgcacacttcacaaagaagtttctcagaatgcttctgtctagtttttatgtgaagatatttccttttccacaataggcctcaaagtgctccaaatatactcttgcagatactacaaaaatacggtttccaaactgctcaataaaggaaaggtacaactctgtgagtgcaatgcacacatcacaaagaagtatctcagaatgcttctgtctattttctatgtgtagatatttccttttctaccataggccacaaagcactccaaatatccacttgcagattttacagaaacattgtttcaaaactgctcaatctaaagaaaggttcaactgtgtgagacaaatgcacacatcacaaagaagtttctcaaaatgcttctgtctagtttttatgtgaagatattaccttttcccctatagcccgcaaagcactccatatatccacttgcagattctacagacagagtgtctcaatactgctcaatgcaaaaaaatttcaactccgtgagatgaatgcacacatcacaaagaagtttctcagaatgcttctgtctagtttttatgtgacgatatttccttttccaccagaggcctcaaaaccctccaaatatactcttgcagacactacaaaaatacggtttccaaactgtttaatcaaaagaaattttcaactctgtgagtgcagtgcacacatcacaaagaagtatctcagaatgcttctatctattttctatgtgtagatatttccttttccaccgtaggcctcaaagcacttgaagtatccacttgcagattctacaaaaagagtgtttcaaaactgctcaatcaaaagaaaggttcaactctgtcagttgaatgcacacatcacaaagaagtttctcagaatgcttctgtctggttttgatgtgaggatattaccttttccactataggccacaaagcgctccgaatatccagtttcagaatctacaaaggagtgtttcaaaactgctcaatcaaaagaaagtttcaactctgtgagatgaatacacacatcacaaagaagtttctcagaatgcttctgtgtagtttttatgtgaagatatttccttttccactatagtctccaaagcgctccaaatatccatttgcagatacaagagaaagactatttccaaactgctcaatcaaaacaaatgttaaactctgtgagttgaatgcacacatcacaaagaagtttctcagaatgcttctgtctagtttttatgtgaagatatttccttttccacaataggactcaaagggctccaaatatccacttgcagattcttcaaacagagtgtttcaaaactgctcaatcaaaaggaaatttcaactctgttagatgaatgcacacaaaagaaagaagtttctgagaatacttctgtctagtttttatgtgaagatatttccttttccaccataagccccaaagcactccaaatatccacatgcagattctacataaagaatgtttcaaaactgctcaataaaaggaaaggtttagctatgggagatgaatgcacacatcacaaagaagtttctcggaatgcttctgtctagttttcatgtgaagagatttccttttccactaaaagacgcaaagctctccaaatatccacttgcagattctacagaaagagtgtttcaaaacggctcatcaaaagaaagtttcaattctatgagatgaatgcccacatcacaacgtagtttctcataatgtctctgtctagtttttatgtgaagatatttccttttccatcatagtccccaaagccctccaaatatccatttgcagatacttcaaaaacattctttccaaactgcttaatgaaaagtaaggttcaaatctgtgagatgaatgcacatatcacaaagaagtttctcagaatgcttctgtcttgtttttatgtgaagattattccttttccaccataggcctcaatgcgctccaaagatccatttgtagataatacaaaaagagtgtttccaaaaggcagaatcaaaagaaatgttcaactctgtgagatgaatgcactcatatgaaagaggtttctcagaattcttctgttaagttttttgtgaagataattcctattaccgcagagccatcaaatggctcccatatatccctttacagatcctacaaaacgactgtttccaagatgatcaattaaaagaaagtttcaaatccatgagatgaatgcacacataacaaatagtattctcagcatgcttttgtctgctttttatgtaaagatatttccttttccaccataggcctcacagtgatccaaatatccacttgcagatactacaaatgagtgtttcaaaactgctcaatcaaacgaaaggaaccacactgtgagatgaatacacacatcacaatgtagtttctgagaatgtttctgtctactttgtatgtgaagttatttccttttcctccataggtttcaaagcgctccaaatttccatttgcagacactacaaaaagattatttccaaattgctcaatgaaaagtaaggttcaaatatttgagatgaatgcacacatcacaaagaagtttctcagaatgcttctgtcttgtttttatgtgaagattgttccttttccaccataggcctcaatgagctccaaagatccatttgtagataatacaaaaagagtatttctgaactgctcaatcaaaagaaatgttcaactgtgtgggatgaatgcactcataagaaagaagtttctcagaatgctgctgtgtagtttttatgtgaagatatttccttttccactataggcctcaaaagctccaaatatccatttgcagatactgcaaaagactgtgtccaaactgctcaatcaaaagaatggttcaactctgagagattaatgctcatatcaccaagaatttttcagaatgtttctgtctaatttttgtgtgaagatattttcttttgcaccataggactcaaagcgctccaaatatacgtttgcagatactgcagaaagactgtttcgaaactgtgcaatcaaaagaaatgttcaacactgtgagattattgcacatatcactaagtagtctctgagaacgcttctgtcttgtttttaggtgaagatatttccttttccaccataggcctcaaagtcctccatatatccactgcagattctacaaaaagaatgtttcaaaactgctcaatcaaaagaaagtttcaactctgtgagatgaatgtgcacatcacaaaacagtttctcagaatgcttctgtctaatttttatgtgaagatatttccttttccactatacaccacaaagggctccacatatccacctacagattctacaaagagtgtttccaaactgctcaatcaaaagaaagattcaaccccgtgagatgaatgcacacatcacaatgtagtttttcagaatacttctgtctattttttatgtaaagctatttccttttccaccatatgcccaaagcgctccaaatatccacttgcagatactacaagaagactgttaccaaactgcttagtaaaaagaaatattcaactctgtgagataaatgcacacatcacaaagaagtatctcagaatacttctgtctagtttttatgtgaagatatttccttctcctccataggcctcaaagtgctccaaataaccatttgcagatagtacaaaaaggctctttccaaactgctcaatcaaaagaaaggttccactctgtgagatgaatgcacacatcaaaaagcagtttgtcagagtgtttctgtctagtttttatgggaatatagtttcttttccaccatagacctcaaacactccaaatatccacttgcaggttctacaaaaagtgtgtttccaaactgctcaatcaaaagaaaagttcaactctgtgagatgaattcacaaattcagaaagaagtttctcagaatgtttctgtttagtttttacgtgttcgtaattcctttttcaccataggccacaatgtgctccaaatatccatttgcacaaacttcaaaacgactgtttccaaacttgtcaatcaaaagaaaggttcacctctgtgagatgaagatacgcatcacaaagaagtttctcagaaaacttctgtctcgtttttctgtgaagttatttccttttccaccctaggcctcaaagcgctgcaaatatccacttgtagattctacaaaacctgtgtttcaaaactgctcaatcaaaataaattttcaactctgagatgaaagcagacaacacaaagtgtttctcagaaagtttctatctattttttctgtgaagataattcttatttcccagaggcatcaaagggctcacaaatatccctttccagattctgcaaaacgactgttccaaactgctcaatcataagaaatgttcaactctgtgagataaatgcacacataacaaagaagtttctcagaatgcttctgtcaagttagtatgagaaaatatatctcttttcaccacagaactcaatgagctcgtaatatccatttgcacatactacaaaaagattgtttccaacatgctcaatgaaaacaaagggccaacaccctgagatgaattcacacatcacaaagaagtttctgagaatgcttctgtctagtttttatgtgaagatatttccttttccaccataggcctcaaagtactccaaatatccacttgcagattcttaaaaagagtgtttccaaactattcaatcaaaagaaagattcaactccgtgagatgattgcacacatcacaaagaggtttctcagaatgtttctctctagtttttatgtgaagatatttcctttcccaacatagtcctcaaatcgctcaaaatatcaacttgcagattctaaaaaggagtgtctcaaaactgctcaatcaaaagaaaaattcaactctgtgagatgaatgcacacatcacgaagaagtttctcagaatgcttctatccagtttttatgtgaagatttttccttttctaccataggctgcaaagctctccaaatattcaattgcagatactacaaaaagactgtttccaaactgctctataaaaagaaagtttcaactctgtgagaataatgcgcacatcacaaagaagtttctcagaaggcttctgtctagtttttatgtgaagatatatccttttccaccataggcctcaaagcgctccaaaaattgtattgcagattcaacaaaaagagtgtttcaaaactgctcaattaaaagaaaggttcaactctgtgagatgaatgcacacatcacaaagaagtttctcagaatgcttctgtctagtttttgtgtgaagttcattccttttccaccataggcctcaaatcactctgaatatccaaatgcagattctcaaaaaagagtgtttccaaatggctcaatcaaaagaaatttcaactctgtagatgaatacacacgtcacaaagaacttcctcagattgcttctgtctagtttttatgtgaagatatttccttttccaccataggcctcaaagcactccaaatatccatttgcagatactacaaaaagactgtttccaaattgctcaatcaaaagaaagtttcaactctgtgagatcgagacacacgtcacaaagaaatttctcagaaattttctgactagtttttatttgaagaaatttccattatgactagaggccttaaagtgctccaaatattatcatgccgatactacaaaaaagactgtttccaaactgctcaataaaaaaaaaaggtttatctctgtgagatgaatgcacacatcacaaagaagtttctcagaaagtttctgtcgagtttttatttgaagacatttcccatttccccttaggtctcaatgggctcagaaatgtaccattgcagagtctacaaaacgaaggtttccaaactgctaaatcaaaagaaagattcaattctgtgagatgaatgcaaacatcacaaatagttttctcagaatgcttctgtctagtttttatgtgaagatatttctttttcaccatatgcctcaaacagcacagaaatatccgtttgcagattgtacaaatactggttccaaactgctcaatcaaaagaaaggctcaactctgtgagatgaaggcacatatcacaaagaattttctcagaatgcttctgtctagtttctatgtgaagatatttcctttttcaccattggcctcaaagcactccatatatccatttgcagatactacaaaaatactgtttccaaacttctcattcaaaaaaaaggttcaactatgtgagttgaatacacacatcacaaagaagtttgtcagaatccctctgtctagtttttatgtgaagatatttccttttccaccatattcctcaaagcgctccaaatatccatttgcagattctaccaaaagagtgtttcaaaactactcaatcaaaagaaaaggtcaactctttgagatgaatgcatacttcacaaagtagtttctgagaatgcttctgtctagtttttttgtgatgatatttccttttttaccataggcctcaaagctatccaaatatccatttgcagatactacaaaaagactgtttccaaactgctcaattgaaagaaagtttattgtatgtgttgaacgcacacattagaaagaagttagtcagaaattttctgtctagtttttaggtggagatatctcctatttcaccataagcctcaatgggctcacaaacatccctttgcagattctacaaaacgagtgtttccaaactgctaaatcaaaagaaacgttcaactctgtgagatgaatgcacaaatcacaaagaagtttctcagaatgcttctgtctagtttttatgtgaagatatttctttttcaccctaggcctcaaacggcatacaaatatccatttgcagattatacaaagactgtctccaaactgctcaatcaaaagaaaagttcaactctgtgagatgaaggaacacatcacaaaggagtttctcagaatgtttctgtctagtttttatgtgaatatatttcctatttccccataggcctcaatgggctttcaaatacacctcagcagtttctacaaaacgactgcttccaagctgctcaatcaaaggaaagtttcaactctgtgaaatgaaagcacacatcagaaaggagtttcttgtaaagcttctgtcttttttttgtgtataggtatttcctatttccccagaggcctcaatgggttcacaaacatccttctgtagattataaaaaacgactgtttccaaactgctcaatcaaaagaaatgttcaactctttgagatgaatgcacacatcaaaaagaagtttctcagaatgcttctatctagtttttatgtgaacatatttccttctctaaaatagtcctgaaagtgctccaaatatccacttgcagattataaaaaaagagtgtttccaaactgctcaatcaaaaaaaatttcaactctgtgagatgaatgcacacatcaaaaagaagtttctcagaatgcttctgtctagtctttttgtgaagatatttccttttccaccgcaggcctcaaagcactccaaatatccatttacagattctccaaaaagagtgtttcacaaattagtttctcagaaaccttctgtctagtttttatgtgaatatatttcctatttccccattggccataaatggctcacaaatatccctgtgcagattctgtgaaaagactgtttcctaactgctcaatcaaaagaaagtttcaacactctgagatgaatgcacacattccaaagtagttcctcagaaacctattgtttagtttttatatgaagatattgtctttttcactgtaggcttcaaagcactccaaatatacctttgcagattctacaaaagtactgtttctaaactgttcaaacaaaagaaagaatcaactctgtgagatgactgcacacatcacaaagtagtttctcagaatgcttctgtccagtttttatgtgaagatatttcctttttcgcaattggcctcaaagcattccaaatatccatttgctaattctacaaaaagactatttccaaagtgctcaatcaaaagaaaagttcaactctgagatgaaagcataccttacaaagcagattctgagaaagcttctgtctcgtttttatgtgaagatattttctatttaaccataggccaaaatgtgctcacaaatatccctttgcacattatacaaaaaggctgtttccagactgctcaattgaaagaaaggttcaaatcactgagatgaacacacacattacaaaaaagttcatcagaatgcttctgtctacttttaatgtgaagatatttctttatcaccataggcatcaaatggctcggatatatccctttgcagagtgttcaaaaagactgttttgacactgctcaattgaaagaaaagttcaactctgtgagatgaatgcacacatcctaaagaattttctcagaaagcttctgtctagtttttatgtgaaggtatttcctatttcaccataggccataaatggctcaaaaaaatcactgtgcagattctacgagaagactgtttccaaactgctcagtcaaaataaatgttcacctctttgggatgaatgcacacatcccaagaagtttcgcagaatacttctgtctagattttatatgtagatatttccttttatgccataggagccaaagcactccaaatatccatttgcagattctacaaaaagactgtttccaaacgaaacgggtgaatcaaaagaaatgttcaactctgtgagatgaaagcatacattaaaaagaagcttctcagaaaacttctttctcgtttttatgtgaagatattacctatttcaccatatgccataatgggcttacaaatatccctgtgcagattctatgaaaagaatgtttccaaagtgctcaatcaaaagaaaatttcaaatctgtgacatgaatgcacacatcacaaataagtttcccagaaagcttctatttagtttttatgtgaagatatttcctttttcaccaaaggcctcaaagcgctccaaatatccatttgcagattctacaaaaagggtatttccaacctgctcaattgaaagaaaggttcaactctgtgagatgaatggatacatttcaaagaagagtctcagaaagcttctgtctagtttttatgtgaagatatttcctatttcaccttagggcataaagggctctcaaatatccctgtgcagattctatgaaaaaactgtttccaaattgctgaatcaagagaaagtttaaactctgtgagatgagtacacacatcacaaagatccttctcagaaaccttctgtttaatttttatgggaagatatttcctttttcaccataggcctttaaccggtcacaaatatccctctacagatactacaaaaagactgtttccaaagtgctccatcaaaagaaaggttcaattctgtgagatgaatacaggcatcacaaagaagtttctcagaatgcttctgtctagtttttatgtgaagatattttctatttcacaataggccataagggactctcaaatgtccctgtggagattctacaaaaagactgtttccaaactgctcaatcaaaagaaaagttcaactttgtgagatgaatgcacacatcacaaagaagtttctcataatgtttctgcctagttttcatgtgaagatatttccttttccaccataggcttcaaagcgttccaattaaccacttgcagattctacaaaaagtgtgtttccaaactgctcaatcagaagaaagtttcaactctgtgagatgaatacacatatcacaaagaagttcctcagaatgcttctgtcttgtttatatgtatagctatttctttttcaccatagccctcaaatggctcggaaatatccatctgcagattgtacaagcaggctgtttgcaaagtgctcaatcaaaggaaagtttcaattctgtgagatgaatgcaggcatcacatgtaagtttcttagaaagcttctgttcagtttttatgtgaagatgttttctttttcactataggcctcaaagcactccaaatatccatttgtggattctacaaaaagagtgcttccaaactgttcattcaaaagaagcgttcaactctgtgagatgaaaacatacatcacaaagaagattctcagaaagcttctgtttagtttttatgtgaagatatttcccttttcccaataggccttaaagtgctccatatatccatttgcagattctacaaaaagactgtttccaaactgctcaatcaaaagaaaggttcaactctgtgagacgaaagcatacattaaaaagaagtttctcagaaagtttctgtctcaattttatgtgaagatattatgtatttcaccatagaccataaagggatcacaaatatccctgtgcagattctaagaaaagactgtttccaaactgctcaatcaaaacaaagtttcaactctgtgaaatgaaatgatacatcacaaagaagtttctaagaaagcttctgtctagtttttatgtgaagatatttcctatttcaccttaggatataaagggctcacaaatatccctgtggagattctacaaaaagactatttccaaactgctcaatcaaaaaaaggtaactttgtgagatgaatacacacatcacaaagaattttctcagaatgcgtctgtctagtttttatgtgaagataattccttttccaccataggcctcaaagcactccaaatatccatttgcagattccacaaaaagactgtttacagtggggtgttaaagtctgccattattattgtttgggagtctaagtctctttgtaggtctctaaggacttgctttatgaatctgcgttctcctgtattggatgcatatatatttaagatagttagatcttcttgttgctttgatccctttaccattatgtaatggctttctttgtctagtttgatctttgttgatttaaagtctgttttatcagagactaggtttgcaacccctgccttttttgttttccatttgtttggtagatcttcctccatccctttattttgagcctatgtgtgtctctgcacctgagatgggtttcctgaatacagcacactgatgggccttgactctttatgcaatttgccagtctgtgtcttttaattggaacatttagcccatttacctttaaagttaatattgttgtgtgtgaatttgatcctgtcattatgatgttagctgttattttgctcgttagttgatgcagtttctccctagcctcgatggccttacaatttggcatgtttttgtagtggctggtaccagtttttcctttccatgtttagtgcttctttcaggagctgttttaaggcatgcctggttttcacaaaatctctcaacatttgcttgtctgtaaagtattttatttttctttcacttttgaagcttagtttggctggatatgaaattctgggttgaaaattcttttctttaagtatgttgaatattggtccccactctcttctggcttgtagagtttctgctgagagacctgctgttagtctgatgggcttccctttgtgggtaacccgagctttctctctggctgcccttaacattttttccttcatttcaactttagtgaatctgacaattatgtgtcttggagttgctcttcttgaggagtctctttggggcattctctgtatttcctgaatttgaatgttggcccgccttgctagattggggaagttctcctggaaaatagcctgcagagtgttttccaacttggttccattctccctgtcactttcagatacaccaatcagacgtagatttggtcttttcacatagtcccatatctcctggaggctttgttcatttcttttttttcttttttctctaaacttcttttcttgcttcatttcattcatttcatcttccatcacagataccctttcttccacttgatcacaatggctactgaggcttctgcatttgtcatgtagctcccatgccttggttttcagctccatcaggtcctttaaggatttctctgcattgtttattctagttatccattcgtctaatttttttacaaagcttttaacttctttgtcattggttcgaatttcctcatgtagctcggagtagtttgatcatctgaagccttcttctctcaactcgtcaaaatcattctccatccagctttgttccattgctggtgaggatctgcgttcctttggaggacaagagacactctgatttttagagtttccagtttttctgctcacttttttcacatctttgtggttttgtctacctttggtctctcatgatggtgatgtacatatgggattttggtgtgcatgtccttgttgtttgttagttttccttctaacaaacaggaccctcggctgcaggtctgttggaatttactagaggtccactgcagaccctgtttgcctgggtatcagcagcggatttgcctgggtatcacacataaaaaagaagttactcagaatgcttctacctagtttttatgtgaagatacttctttttcaccataggactcaaatggttcagaaatatccctttgcagattctacaaaaagtctttttccaaactgctcaatgaaaagaaaggttcaactctgtgagatgaatgcacacatgaaaaagaagtttctcaggatgcttctatctagtttttatgtgaagatatttttttttcaccataggcctcaaatagctcagaaatatccatttgcagattgtacaaaaatactttttccaaactgctcactgaaaagaaagattcaactctgtgagatgaatgcaaatatcacaaagaggtttctcaaaaaacttctgtctagtttttatgtgaagatatttcctttttaaccataggcatcaaaccactcacaaatatccctttgcagattacacaaaaagactgtttccaaactgctcaatgaaaagaaaggttcaaccctgtgagaagaatgcacacatgaaaaagaagtttctcagaacgcttctgtctagtttttatgtgaagatatttctttttcaccataggcctcaatctactcagaaatattcctttgcaggttacacaaaagactgtttacaaactgctcaatgaaaagaaacgttcaacactgtgagaagaacacacacataaaaaaaagtttctcagattgcttctgtctggtttttatgtgaaaatatttccttttttaccataggtctcaatccgctcagaaatatccatttgcagattgtacaaaaatactgtttccaaactgctcactgaaaagaaagggtcaactctgtgagatgaatgcaaacatcacaaaggggtttctcaaagagcttctgtctagtttttatgtgaagatatttcctatctcaccataggccataaatggctctgaaatataactttccacattccacaaaaggactgtttctaaactgctcaatcagaagaaaggttcaactctgtgagacaaatggacacatcacaaagaagattcccagagagtttctgtctagtttttatgtgaagatatttcttttcaaccatcagcctcaaatggctcagaaatatccctttgcagattataaaaaaaaaaaaaaaactgcttccaaactgcttaatcaaaagaaagtttcatccctgtgagatgaatgaccacatcaaaaagaagtttctcagaatgattctgtttagtttttatatgaagatatttcattttcaccatattcctcaaagggctccaaatatccattagcagactctacaaaaagagtgtttccaaactcctcaatcaaaataaagttttaactctgtaagatgaaagcacacatcacaaagaagtttctcagaaagtttctgactactttttatgtgaaaatattacctatttcacaataggactcaatggtttcacaaatatccctttgcagatactaaaaaggactgtttccacaatgctcaaccaaaagaaagtttcaactttgtgagatgaaagcacatatcacaaagaggtttctcaaaatactgctgtctagtttttatgtgaagatatttcctttttcaccataggccttgaaccactcagaaacattcctctgcagatactacaaaaagactgtttccaaactgctacatcaatagaaagtttcaattctgtgagatgaatgcacacaacacaaagaagtttcccagaatacttctgtctagtttctttgtgaagatatttcttttttatcatagcctcaaaatgctccaaatatccatttggagattattcaaaaagtctgtttcaaaactgctcaattaaaggaaacactcaactctgtgagatgaaagcatgcatcacaggaagtttctcagaaagcttctgtctactttttatgtgaacatatttcctatttcaacataggccaaaaagggctcacaaatatccctttgcagattctacaaaaggactgtttccaaactgttcaataaaaagaaactttcaaccctgtgagatgaatgcagacatcacaatgaagtttctcagaatgcttctgtctagtttttatgtgaagatatttcctttttcaacataagcctcaaaatactcacacatatccctatgcagatactacaaaaagactgtttccaaactgctccatcaaaagaaaggttgaactctgttagatgtatgcacacagcacaaagaagtttctcagaatgcttttgcctagtttttatgtgaagatatttcccttttcaccataggcatcaaagcattccaaatattgatttgcagattctacaaaaagactgtttccaaactgctcaatcaaaagaaaagttcaactctgggagttgaatgcacacatcacaaagaagtttctgggaaatattctgtttaggtttatgtgaagatattacctttttgaccataggctggaaagcgctccaaatatccatttgcagattctacaaaaatggtgtttccaaactgctctatcaaaagaaaggttcaactctgtgagatgaatgcacacatcacaaagtagtttatcagaatgcttctgtctagtttttatgtgaagatattgtctttttcaccataggccacaaaacacaccaaatatcaatttgcagattctacaaaaagactgtttccaaactgctcaatcaaaagaaagtttcaactacgggagatgaatgcacacatcacaaagaagtttctcagaaagcttccttttagtttttatgttaaggtatttcctgtttcaccacaggacataaagggctcacaaatatcccttttctggttctacgaaaacactgttaccaaactgctcaatcaaaagaaaggttcaacactgtgagatgaatggacacattacaaagaaatttctcagaaggtttctctctagtttttatatgaagatacttgtttttcacaataggtctcaaaaggctcagaaatatccctttgcaaattgtacaaaaacactgtttccaaactgctctatcaaaagaaagattcaactctgggagaagaatgcaaatgtcacaaagaagtttctcaaaaagcttccattttgcttttagtgaagatatttcctttttcatcataggcctcaaagcgctgcaaatacccatttgaagattctacaaaaagagtgtttccaaactgctcaaacaaaagaaaggttcaactgtgagatgaatgcacacaaaacaaagaagtttctcagaatgcttctgtctagtttttatgtgaagatatttccattttcacaattgtcctgaaagcactccaaatatccatttgcagattctacgaaaatactgtttccaaactgctcaagcaaaagagaggttgaactttgtgagatgaaagcacacagcacaaagaagtttctcagaatgcttctctctagattttatgtgaagatacttctttttcaacacaggcctcaaacgactcagaattatccctttgcagattgtacaaaaagacagtttccaaactgcacaatcaaaagaaaggttcaactctgggagatgaatgcacacatcacaaagaagtttctcacaaagcttctgtttattttttacctgaagatatttcctttttcaccatatacctcaaagcactccaaatatccatttctgtattctacaaaaagaaagtttccaaactgctcaatcaaaagaaaggttcaactctgtgagataaatgcacacatcacaatgaattttctcagaatgtttctgtctagtttttgtgtaaagatatttcatttttatccataggtcttaaatcagtcacaaatatccctttacagatactacaaaaagaatgcttccaacctgctgtatgaaaagaaaggttcaactctgtcacatgagtgaaaccattacaaaggtgtttctcagaataattccgtctagtgtttatgtgatgatatttcatttatcaacacaggccttaaaccacccaaaaatattcctcttcagatactacaaaaggactgtttccaaattgctccaccaaaagaaaggttcaactctgtgagatgaatgcacacatcacaaagaagtttctcagaatgcttctgtctaatttttatgtgaagatatttcctttttcaccgtagacaacaaatcgctccaaatatcaatttgtagattctacaaaaaggctgtttccacactgctcaataaaaagaaaggttcaactctgggagatgaatgcacacatcacaaggaagattctcagaaagcttctgtttagattttttgtgataatagtttctttttcaccacaggcctcaaagcactccaaatatctatttgcaaattctacaaaaagagaatttccaagttgttcaatcaaaagaaaggttcaactctttgagacaaatgcacacataacaaagaagtttctcagaatgattctgtctagcttttatgtgaagatatttcctttttcaccgtagaccttagacagctcaaaaatatccctctgcagatactacaaaaagactgtttccaaactgttccatcaaaacaaggttcaactctgtaagatgaatgcacacatcacaaagaagtttctcagaatgcttctgcctagttttgatgtgaagatatttcctttttcaactttgccctcaaagtgccccaaatatccatttgcagatgctacaaaaagacagtttccaaacttttcaaaaaaagaaacgttcaactctgtgagatgaaagcatacatcacaaagaagtttcttagaaaacttctgtctagtttttatgtgaagatatttcctatttcaccataggtcataaagggctcacaaatatcactttgcaggttctacgagaacactttttccaaactgctcaatcaaaatagagcttcaactctgtgacatgaatgcacacatcacaaagaattttctcagaatgcttctgtctagtttttatgtgaagatatttcctttttcaccatagacactaaagcattcacaaatatccctctgtatactctacaaaaagactgtttctaaaattatccttcaaaagaaagttgaactctgagatgaatgcacacttcacaaaggaatttctcagaatgcttatgtctagtttttatgtgaagatattccctttttcacgatagtcctcaaagcattacaaatattcatttgaagattctacaaaaagacagtttccaaatttctcaatcaaaagaaagtttcaactctgtgagatgaaaacacacatcacaaagaagtttctcagaaagcttctgtctagtttttatgtgaacatatttcctatttcaccataggcctcaatgggctcacaaatatccctttgcagattctacaaaagcactgtttccaaacttgtcaataaaaagaaaggtttgactctgtgaggtgaattcacacatcacaaagaagtttctcagaatgcttctgtatagtttttatgtgaagatatttcctttttcacagtaggcctcaaagcgcttcaaatatccactcgcagattctacacaaagactgtttccacactgctcaatcaaaggaagtttcaactctgtgtaatgaatgcacatatcacaaagaaatttctcagaaaacttctgtttagtttttacatgaagttatttcctttttttccatagacctcaaagcactccaaatatccatttgcagattctacagaaagagtgtttccaaactgctcaatcaaaagaatgtttcaactctgtgagatgaaagcatgcattacaaagaactttctcagaaagcttctgtttagttttcttgtgaagatatttcctatttcacaatcacctcaatgagctcacaaatatcccattgcagattctacaaaaggactgttttgaaactgttcaaacaaaagaaaggttcaattctgtgaaatgaatgcacacatcacaaagaactttttcagaatgattctgtctagtttttatgtgaagatatttcctttttcatcatattcctcaaagcactccaaatatccatttgcagattctaccaaaagactatttccaactgctcaagaaaaagaagggttcaaccctgtgagatgaatgcacacatcacaaagatgtctttcagaatgcttctgtctagtttttatgggaaaatatttcctatttcaccataggcaataaaaggctcaaatatatcactttgcagattctacaaaaagactgtttccaaactgctcagacaaaagaaagtttcaactctgtgagataaatggacacatcacaaagaagttcctcagaatgcttctctcgagtttttctgtgaaggtattactttttcaccataggcctcaaacagctctgaaatatcccttgcagattgtaggaaaagacagtttccaaactgctcaatgaaaagaaagcttcaatactgtgagatgaatgcacccatcacaaagaagtttctcacaaagcttctgtctagtttttatgtgaagatatttcctatttcacaataggcctcaatcagctcacaaatatcccttttgcagatactacaaaagcactgtttccaaactgttccaacaaaactaatgttcaactctgtgaaatgaatgcacacatcaaaaagaagtttctcagactgcttctgtgtacttactatgtgaaggtatttcctttttcaccatagacctcaaagctctccaaatatccattttcagattctacctaaagactgtttccaaactgctcaaacaaaagaaaggttcaactatcagaaatgaatggacacaacacaaagaagtttctcagaatgcttctgtctaatttttatgtgaaatatttcctatttcaccatatgccataaagggctcaaaaatatctctttgcagaatgtacaaaaagacagtttccaaactgctcaaagaaaacaaaggttcaaatctgtgagatcaatggatacatcacaaacaagtttctcagaatgcttctgtctagtttttatgtgaacacattacttttccaccataggcctcaagcagctcacaaatattcccttacagattgtacaaaaagagtgtttccaaactgctcaatcaatagaaactttcaactctgtgagatgaaagcatacatcacagagatgtttctcagaaagcttctgtctagtttttgtgtgaagatatttcctatttcaccatacgccatcaatggatcacagatatcccattccagattctgcaagaggacactttccaaactgttcaatcaaaagaaaggtgcaactctgtgagatgactgcacacatcacaaataagtttctcagaatgcttctgtctagattttatgcgaggacatttgctgtgtcaccataggcctcaaagtgatccaaatatccatttgcagatactacataaacactgtttgcaagctgctcaatcaaaagaaaggttgaactctgtgagatgaaagcatacatctcaaagaagtttcccacaaaccttctgtgtcgtttttatgtggagatatttcatattgcacaataggccataaacggctcacaaatatccttttgcagattgtacaaaaagactgtttccaaactgctcaatcaaaagaaaagttcaacgtgtgagacgaatgtgcacatcacaaaggagtttctcagaatgcttctgtctagtttttatgtgaagatatttccttcttcaccacaggcctcaaagtgctccaaatattcatttgcagattctacaaagagactctttccaaactgctcaatcaaaagaaagattgatctctttgagatgaaagcacacatcacaaaaagtttcacagaaaacttctgtctagtttttatgtgataatatttcctatttcatgatatgcttccatgtgctcacaaatatcccttttcagattctacaaaaggactgtttccaaactgttcaatcaaaaaaaaggttcaactctgagagatgaatgcacacatcacaaagaagtttctcataaagcctctgtttagtttttatgtgaatatatttcctttttcaccatctgcctcaatgtgctgcaaatatccatttgcagattctacaaaaagagtgtttccaaactgctccatcaaaaaaaaggttcaattccatgagatgaatgcacccatcacaaaggagtttctcaaaatgcctctgtctaattttttttttttgatgatatttcattttccactataggtctcaaagtgctgcaaatatccatttgcagattctacaaaacaactgtttccaaactgctctatcataattaaggttcaactctgggagaggaaatcacacataacaaagaagttcctcagaaacttctgtctagtttttgtgtgaagatatttcctatttcaccataggccacaaagggctcaaaagtatccctttgcagattctgcaaaaggactcgttcaaaacagcccactcaaaggaaagtttcatctgtgtgagatgaatacacagatgacaaagtagtttcttagaatgcttctgtctagtttttatgtgaagatatttcctttttcatcataggccttaaaccactcacaaatatacctctgcagatactacaaaacgactgtttgccaactactcaatcaaaggaaaggtgcatctctgtgagatgaatgcacacatcacagagaagcttatcagaatgcttctgtctaatttttatgtgaagatatttcctttttcaccataggcctcaatgtgctctaaatatccatttgtagaccacacaaaaagacggtttccaaactgctcaatcaaaagaaagtttcaactctggtagatgaaatcatatatgacaaagaagtttctcagaaagcttctgtctagtttttgaatggagatatttcctatttcaccaaaggacagaaatggctcaaaaatatacattttcagattctacaaaaggactctttacaaactgctccatcaaaagaaagtttcaattctgtgagatgaatacaccgattacaaaaagattctcagaatgcttctgtctagtttttatgtgaagatattttctttttcaccataggcattacattgctcacaaatatccctctgcagctactacaaaaagaccgtttccaaaatgctcattcaaaagaaaggttcaactctgtgacatgaaagggcacatcactatgaagtttctcagaatgcttctctctagtttttaaatgaaggtacttctttttcaccataggcccaaatgggctcacaaatatccctttacagattgtagaaaaggactgcttccaaactgatcaaatgaaagaaagtttcaactctgtgagatgaatgcaaacatcacaaagaagttcctcagaatgcttctgcctagtttttatgtgaagatatttcctttttcaccataggcctcaaagtgcttcaaatatccatttgcagattctaccaaaagactgtttccaaactgctcaaacaaaagagagattcaactatcagaaatgaatggacacaacacaaagaagtttctcagaatgcctcggtgcactttttatgtgaaaatacttatttttcaccacagacctcaaatgtctcggaaacatcccttgcagatcgtacaaaaagactgtttccaaactgctcaatcaaaagtaggtttcaaatctgtgaggtgaatgcacccatcacaaagaagtttctcagaaaacttctcttattttttctgtgaagatatttcctttttcaccacaggcctccaagcactccaaatatccatatgcagattatacaaaaagaatgtttccaaactgctccatcaaaaaaaggttcaactctgtgagatgaatgcacacatcatagaggagtttgttagaattcttctgtctagtttttatgtgatgatatttcctttttcaccataggcctaaactgctcacaaatatccctctgcagataatatgaaaagactgtttccaaactgctccatcaaaagaaagcttcaactttgtgagaggaatgcacacaacaaaaagcagtttctcagaatgcttctgtctagattttatgtcaagatatttcctttttctccataggcctgaaagtgctccaaatattcatttgtagattctacaaaaagactgtttctaaactgctcaatcaaagaaaggttcaactctgtgggatgaaagcacacatcacaaattagtttctcagaaagcttctgtctaggttttatgtaaagatatttcctatttagcataggccacaatgggctcacaaatatccctctgcagattcttctaatggactgtttccaaactgttcaagaaaaaaaagcggtgttgccaaactgctccaaaaaacgaaatgttcaactctgtgaggtaaatgcacacatcacaaagaagtttctcagaatgcttcagtctagtttttatgtgaagatacttccttttggaccataggcctcaaagctctccaaatgtccatttggagatcctacaaaaacactgcttccaaactgctcaatgaaaagtaacgttcaactccgtgggaagaaagcatacatcacaaagtttctcagaaagtttctgtctagttttggagtgaacatatttcctatttcatcgtaggccataaagggctcacaaatatccctctgcaaattctacgaaaggactctctccaaactgctcaatcaaaagaaaggctcaactctgtgagatgaatgcaaatatcacaaaaaaattctcagaatgcttctgtctagtttttatgtgaaggtatttcctttttcaccatagtcctcaaagtgctccaagtatagatttgtagattctacaaaaagattttgtcgaaactactcaatcaaaagaaaggttgaacactgggagatgaatgcacaaatcacaaaggagtttctcagaatgcttctgtctagtttttatgtgaagatatttcctttttcatcataggccttaaaccggtcacaattatccctatgcagatactacaagaagactgtttccaagctgctccatcaaaagaaaagttcaactctgagaaatgaatgcacacatcacaaagaagtttctcagaatgcttctgtctagttactatgtgaagatatttcctttttcaccataggtctcaaaacgctccaaatacccatttgcagattctacaaaaagactatttctaaactgcacaatcatcagaaaggttcaagtctatgagatggaaacatacatcagatagaagtttctcagtaagcttctgtctagtttttatgtgaagatatttcccttttcaccataggccttaaactgctcacaaatatccctctgcacatactacaaagagactctttccaaacttctccatcaaaggaaaggttcaactctgtgagatgattgcaaacatcacaaaagattttgtcagaattcttctgtctagttttaatgtgaagatgtttcctttttcaccttcagcctcaaagcgctccaaatatccagttgcatattctacaaaaatgctttttccaaactgctcaatccaaagaatggttcaatgccatgaaatgaaagcacacatcacaaagtagtttgtcagaaagcttctgtctggtttttattgaagatatttcctgtttcaccataggcttcaatgggcataaaaatatccctttgcagattttacaaaaggactgtttccaaacagttcaaacaaaagagaggttcaactctgtgagatgcaatcacacatcacaaaaaagtttgtcaaaatgcttctgtctactttttatgttgatatatttcctttttcatcataggacataaagggctgaaaaatatccctttgcagattgtacaaaaagactgtttccaaactgatgaatcaaaagaaaggttcaacactttgagatgaatggacacaacacaaataagtttctcataatgcttctgtataatttttatgtgaagatacttctttttcaccgtaggcctcaaacagcttggaattatccatttgcagattgtacaaaaagactgattccaaactgttcaatcaaaaggaacgttcaaatctgtgagaggaatgcacacatcacaaagaagtttctcagaaagcttctgtttagtttttatgtggagatatttcctttttcactataggccttgaagcactacaaatatccatttgtagagtctacaaaagagtttttccaaactgctccatcaaaagaaaggttgaactgtgagagatgaagcatacagaacaaagaagtttctcagaaatattctgtctagtttttatgtgaagatatttcctatttcaccataggccataaagttctcacaaatatccctttgcagattctacaaaaacagtgtttccaaactgttcaatcaaagaaaggttcaaccctctgagacgaatgcaggcatcacaaagaagtttctcagaattcttctctctagttgttatgtgaagatattttctttttcaccataggcctcatagcattccaaatgcccatttgcaaattctacaaaaagactgtttccaaactgctcaataaaaacaaacgttcatctctgtgagatgaaatcatacatcacaaagaagtttctcagtgaacttctgtctagtttttatgtgaagatatttcctttttcaccatagtacttaaactgctcacaaatatccctctgcagaaacttcaaaaagactctttccaaactgctccatcaaaggaaaggttcgtctctgtgagatgaatgcacacagagcaaagaagtttctaagaatgcttctgtctagtttttatgtgaagatacttcatttttcaccataggccctaactgctcacaaatatcgctctgcagttactacaaaaagactccttccaacgtgcaccatcaaaagaaacgttcagctctgtgagatgcatgcacacatcacaaaggagtttctcaaaatgcctttgtctagtttttatgtgtagatatttccttttcaacataggcctcaaagtgctccaaatatccacttgcagattctacaaatagacggtttccaaactgctcaatcaaaagaaaggttcaactctgtgagatgaatgcaaacatcaaaaagaaggttctcagaaagcttctgtctgcttttatgtgaagatatttcctatttcatcataggccataaagggctcacaaatatccctttacagatcctacgaaaagactgtttacaaaatgctcaatcaaaagaaagtttcaactctgtgagatgaatggacacatccaaaagaagtttctcagaatgcttctgtctagtttttatgtgaggatgtttctttttcaccataggcctaaaacagctcagaaatatccctttgcagattctacaagaagactgtttcgaatctgctccatcaaaagaagggctcaactctttgagatgaatgcaggcatcacaaagaagtttctcagaatgcttccatctggttttatgtgaagatatttcctttttcaccgtatacctcaaagggctccaagtatccatttgtagattccacaaaaatgctttttccaaactgctcaatcaaaagaaaggttcaactctgagagacgaaagcatacatcataaagaagtttctcagaaagcttctgtctagtttttatttgaagatatttcctattccacagtaggccatacagggctcaaaaatatccctttgcagattctatgaaaagactgtttcaaaattgctcaatcaaaagaaagtttcaaatctgggagatgaatggacacattacaaagaagttttttagaatacttctgtctagtttttatgtgaagaaatttcctttttcaccataggcctcaaagtgctccaaatatgcatttgtagattctacaaaaaactgaattcttttttttttttgatttggaaatactactttattcctttataatcaatatatatatcttaatactttctgtgtgtcagataatacactgggtcctgaggaaaacaaggtataaaaataatttttctcatacttgagaagatttcagtctagcggggaatgattgagaggagtcatttcccaaaaagactgatttctaaatgctccatgaaaagagaggatcaactctgtgagatgaaggcacacatcacaaagaacttactcagagtgtttccgtttagtttttatgtgaagatgttccctatttcaccataggcattaaactgcgcacaaatatccctctgcagataatacaaaaggacgggttccaaactgctccatcaaaagaaatgttcaactctgtgagatgaatgcacacatcgcaaagtagtttctcagaaagcttctgcttagtttttatgtgaagatatttcctttttcacaataggccttaaaacgctcaaaatatccatttgcagattctacaaaaagactgtttccaaactgctcaatcaaaaagaggttcaactctgtgagatgaatgcaaacatcacaaagaactttctcagaaacatctgtctgcttttaagttgaagacatttcctatttcaccatagaccataaagggcttacaaatatccctttgcagattctacaaaaagaatttttccaaactgctcaatcagaagaaagtttcaacactgtgagatgaatggacatatcacaaagaattttctcagaaagcttctgtctagttttttatgtgaggatatttatttttaatcataggcctcaacagctcagaaatatcactttgcagattgtacaagaagactgtttcgaaactgctccatcaatagaaaggttcaacactttgagatgaatgcaggcatcacaaagaagtttctcaggatgcttctgtctagtttctatgtgaagatatttccttttttaccataggcctcaaagtgctataaatatccatttgcagattctacaaaaagactgtttccaaacttctcaatcaaaagaaggattcaaatgtctgagatgaaccaacacattataaagaagtttcaaagaatgcttctgtctagtatttatgtggagatattcgctttttcatcataggccttaaaccggacacaaatatccctctgcagatacttcaaaaagactcttttggaacttctccatcaaaagaaagtttcaactttgtgagatgaatgcacacatcaccaagaagtttctcagacagactcagtctagtttttatgcgaagatatttcctttttcaccatagtcctcaaagcgctccaaatatccatttgcagattctacaaaaagactgtttccaactgctcaatcaaaagaaagtttcaactctgtgagatgaaagcatacatcacaaagaaatttctcagaaatcttctgtcttctttttatgtgaagatatttcctatttcaccataggccataaagagctcaaaaatatccctgtgcagattctttgaaaacactgcttccaaatgctcaatcaaaagaaaggttcaactctgtgagatgaatgcacacatcacaaagaagtttctcagactccttctgtctagtttttatgtgaagacattctttattcaccataggcctcaaacagctcagaaatatccatttgcagattgtacaaaaagactgtttccaaactgcttaatcaaaagaaagtttcaactctgtgaaattaatgcaggtatcaaaaagaagtttctcagaatgcttcagtctaatttttatgtggagatatttcctttttcactataggcctcaaagtgcttcaaatatccatttgcagattctacaaaaaggctgtttccaaactgcttaatgaaaagacagtttcaagtctgtgagatgaatacacacatctctaagaagtttcttagaatgattctctctagcttttatgtgtagatattttctttttcaccataggccttaaatcggtcacaaatatcccccagcagatacttcaaaaagacgtttccaaactgctccatcaaaagaaatattcaaacctctgagatgaatgcacacatcacagtgaagtttatcagaatgcttctgtctaatttttaagtgaagatatattctttttcaccataggcctcaaaaccctccaaatatccacttgcagattatacaaaaagactgtttctaaacagctcaatcaaaaagaaggttcaactctgtgagatgaaagcatacatcacaaagaagttcctcagaaagctactgtctagttttgatgtgaagatattttctatttcaccataggccacaatgggctcacaagtatccctgttcagattctatgaaaagactgtttccaaactgctcaaacaaaggagagattcaactctgtgagacgaatgcacacatcacaaagaagtttctcagagttattctgcctagtttttatgtaaagatatttcctttatcaccataggcctcaaagcactccaaatatccatttgaagattctacaaaaagagtttttccaacctgctcaatcaaaagaaagattcaactctgcgagatgaaggcacatgtcacaaaaaagtttctcagaatgcttctgtccactttttatgtgaagatatttcctttttcatcattggcctcaaagcgctccaaatatccttttacagattctacaaaaagactgtttcctaactgctcaatcaaagcaaaggcttaactctgtgagatgaatgcactcatcacaaacaagcttctcagattgcttctgtctagttctgatatttagatattcctttttcaccatagggcacaaacggctcaaaaatatccatttgcagattgtacaaaaagactgtttccaaattgctcaatgaaaagaaaggttcaactctgtgaaatgcatgcaggtatcacaaagaagtttctcagagtgcttctgtctattttttatatgaagatatttccttttcaccatagacatcaaagccctccaaatatccatttgcagattctaaaaaaatactgctttcaaactgctcaatcaaaaggaagcttcaactctgtaagatgaatgcacacatcacaaagtttcccagaatgcttctgtctagtttttatcacaagatatttcctatgtaaatgtatgcctcaaagcgattcaaatatccatttgaagattctacaaaaagagtgtttccaacaagttcaatcaaaagaaaattcaactttgtgagatgaatgcacacatcacaaagaagtttctctaaacgcttctgtatagtttttatgtgaagatatttcctttttcaccatagaccttaaacacgtcacaaatatccctcagcagatactacaaaaagagtgtttccaaagtgctccatgaaaagaaagcttcaactctgtgagatgaaagcctacatcacaaagaagtttctcagaatgcttctgtctactttttatgtgaagatatctctttttcacaataggcctcaaacggttcagaaatatccctttgcagattgtacaaaaagactgtttccaaattgctcaatcaaaagaaagtttcaactctgtgtgatgaatgcaggtatcacaaagaagtttctcagaaaggttctgtctagtatttacgtgaagtgatttactatttcaccacaggccgtaaagggctcaaaagtatcccagtgcatattctacagaaagactgtttccaaagtgcttcatctaaagaaaggttcagcactgtgagatgaatacacacatcacaaagaagtttctctgaatgctattgtatagtatttatatgaagatatttcctttttcaccataggccacaatcctctccaaatgtcaatttgcagattctataaaaacagtgtttctaacctgctcaatcaaaagaatggttcaactctgtgagatgaatgcacacatcaccaagaagtttctcagaatgtttctgtctcgtttttatgtaaagatacttcctttttcaccaagggccttaaaccaatcacaaatatctctctgtagatactacaaaaagactgtttccaaagtcctccatcaaaagaaaatttcaactctgtgagacgaatgcacacatcatgaagaagtttctcagaatgcttctgtctagtttttatatgaatatacttcttttttcaccataggcctcaaagcactccaaatatccatttgcagactctacaaaaagagtgttttcaacgtgctcaatcaaaacaaaggttcatctcagtgagatgaatgcacacatcacaaagatgtttttcagaatggttctgtctagtatttatgtgaagatatttcctttatcaccgtaggccttaaaccggtcacaaatatccatctgcagataccacaaaaagactatttccaaagtgctccatgaaaagaaaggttcaatcctgtaacatgaatgaacacatcacaaagaagtttctcagaatgcttctgtctagtttttatgtgaagatacttctttttaaacattgtcctcaaaaggctcagaaatatccctttgcagattgtacgaaaagactgcctcaaaactgctcagtcagaagaaagtttcaactctgagatgaatgtaggcatcacaaagaagtttctcagaatgcttctgtctagtttctacatgaagatattacctatttcaccataggccaaaaagggctcacaaatatccctgttcaaattctacgtatacacggtttccaaactgctccatcagaagacacgttcaactctgtgagatgaatgcacacatcacaaagaagtttctcaggtgattctgtgttgtttttatgtgaagatattccatttttcaccagagacctcaaagtgttgcaaatatccatttgcagatgctacaaaaagagtgttaacaacctgctcaatcaaaagaaaggttcaactctgtgagctgaatgcacacatcaaaaagatatttctcagaatgcttctgtccagtttttatgtgaagatatttccattttcaccattggccttaaaccggtcactaatatcactctgcagatactactaaacgactgtttccaaactgttacatcaaaagaaaggttcaacactgtgaaacgaatgcactcatcacaaagaagtttctctgaatgcttctgtgtagtttttctgtgaagatatttcctttttcaccataggactcaaagcgttccaaatatccatttgcagatctacaaaaagacagtttccaaagtgctcaatcaaaagaaacgttcaactgtttgagatgaaagcatatatcacaaagaattttatcagaaaacttctatctagtttttatgtgaggatatttcctacttcaccataggccataaggggctcacaaatatccctgtgcagattctacgaaaagactgtttccaaactgctcaatgaaaagaaagtttcaactcagtgagatgaatgcacacagcacaaagaagtttctcagaatgcttctgtctagtttttatgtgaagatatttcctttttcaccacaagccctaaaccagtcacaaatatccccttgcagatactataaaaaggctgtttccaaagtgctccatgaaaagaaaagttcaactctgtgagatgaatgcaggcatcaaaagaagtttctcaaaatgcttctttccagttcttatctgaagatatttagtttttcaccatagtccttaaattgctcaaaatatccatttgcagaatctacaaaaagactgtttccaaactgctcaatcaaataaaagttcaactctgtgagatgaatacacccatcacaaagaagtttctcagaatgcttctgtctactctttatgtgatgataattcctttttcaccataggcctcaaagggctccaagtatccatttgcagcttctaaaaaaagagcatttccaactggctctatcaaaagaaagtttcagttctgtgagatgaatgcacacatcacagagcagtttctcagaatgcttctgtctagtttttatatgaagatatttcctttttcaccacaggccttaaaccgttcacaaacatcccactgcagataatacaaaaagactgtttcccaattgctccatgaaaacaaaaggttcaactctgtcagatgaatgcacacaccaaaaagaagtttcccagaatccttctgtctagtttttatgtgaagatatttccttgttcaccttaggcctcaaaccactccaaatatccatttgcagactctacaaaaagatgtttccaacctgctcaatcaaaagaaaggttctattctgtgagatgaaagcacacgtcacaaagaactttctcagaatacttctgtctagtttttatgtgaagatatttcctttttcaacataagtcttaagcctcgcacaaatatccctctacagatacttcacaagcactgtttggaaactgctccatcaaaataaattttcaactctgtgagatgagtgcacagatcacaaggaagttcctcagaatgcttctgtctagtttttattggaagttatttctttttcaccatatgcctcaaacagctcggaaatatccctttggataaggtttaaacagactgtttccaaattgctcaatcagaagagagcttcaactctgagatgaatgcaggcatccaaaagaagtttctcagaatgtttctttctagtttttatgtgaagatatttcctttttcaccataggcctcaaatcgctccaaatatccatttgcagtttctacaaaaagactgtttccaaactgctcaaccaaagaaaagttcaactcggtgagatgaatgctcacatcacaaataaatttctgacagtgcttctgccagaagcaaatcgatatttgctatttcaaaatagggtgtaaagggctcacaaatatatctgtgtagattttatgaaaaaactgtttccaaactgctcaatcaaaagattcaactctgtgaaatgaatgcagatatcacatagaagttcctcagaataattctgtctagtttttatgtgaagatatttcctttatcaccataggcctcaaagtgctccaaatatccctttgcagattctacaaaatgatggattccaaactgctctatcaaaagaacggtacaactctgtgagatgaatgcacacatcacaaagaagtctctcagaatgcttctgtctggtttttaagtgaagatatttcctttttcaccaaaggcttcaaagcgctccaaatatccatttgcagattctacaaaaagagtgtatccaacctgctcaataaaagaatggttcaactctgtgagatgaattcacacatcacaaagcagtttctcagaatgcttctgtctagtttttatgagaagatatttcctttttcacccgaggccttaaaccagtcacaaatatccctctgcagattctacaaaaagactctttctaaactgctccatcaaaagaagggttcaactcggtgagatgaatgcacacatcacaaagaagtttctcagaatggttctgtctaattcttctgtgaagatatttcctttttcaccacaggcctcaaagcgctctgaatatccatttccagattctacaaaaagactgtttccaaactgctcaatcaaaaggaatgttcaactctgtgagatggaagcaaacatcacaaggaagtttctcagaaagcttctgtctagcttttatgtgaaatacttcctatttcaccacaggctataaagggctgacaaatatccctgtgcagattctatgaaaagactgtttccaaactgctcaatcaaaagaaaggttcaacgctgtgaaatgaatgcaagcatcacaaagaagtttcccagaaagcttatgtttactttttatgtgaagatatttcctttttcaccataggacccacagcgctccaaatatacatttgcagattctacaaaaagacttttttcaaactgctcaatgaaaagaaagcttcaactctgtgagatgaatgcacaaatctcaaagcagcttctctcaatgcttctgtcaggtttttatgtgaatatatttcctttttctccataagccatagagggctcacatatatgctcttgcagattctaccaaaaaccatttccgaattgctcaatcaagaggatggctcaaccatttgagatgaatggactcatgacaaagaagtttctcagaatgcttctgtctagtagttatatgaagatatttctttttcaccataggcctcaaactgctcagaaatatccctttgcagattgtacaaaaagactgtttccaaagagtttaattaaaatgaatgttcaagactgtgagatgaatggacacaacacaaaaaagtttctcagaaaactcctgttcagtttttatgtgaaaatatttcgtttttcaccataggcctcaaatcgctccaaatatccttttgcggattctacaaaaagagtgtttccaaattgctcaaacaaaagaaacattcaactctgtgagatagaagctcgcatcacaaagaggtttctcagaaagattcagtttagtttttatatgaagatatttcctttttcaacataggaatcaatgggctcagaaatatcccttttcagattctacaaaaggactgtttccaaactgctcaatccaaagaaaggttcaactcttgagagatgaatacacacatcacagagaagtttctctgaatgcttctgtgtagtttttatgtgaggatatgtctttttcaccataggcctcaaacagctcacaaatatccctctgcagataccatgaaaagactgcttccaaactgctcaatcaaaagaaaggttcaactctgagcagtttttatgtatctcaggatacaaaatcaaggtacaaaaatcacaagcattcgtatgcaccaataacagacaaacagagagccaaatcatgagtgaactcccattcacaattgcttcaaaggtaataaaatactcaggaattcaacttacaagggacatgaaggacttcttcaaggagaacaacaaactactgctcaatgaaataaaagaggatacaaagaaatggaagaacattccatgctcatgggtaggaaggagcaatatcgtgaaaatggccatactgcccaaggtaatttatcgattcaatgacatccccattaagctgccaatgactttcatcacagaattggaaaaaagtactttaaagttcatatggaaccaataaagagcctgcattgccaagtcaatcctaagccaaaagaataaacctggaagaatcacgctacctgacttcaaactatactacaaggctactgtaaccaaaactgcatggtactggtaacaaaccagagatatagatcaatggaacagaacagagccctcagaaataacgccgcatatctaaaacaatctgatctttgacaaacctgagaaaaacaagcaatggggaaatgatcacctatttaataaatggtgctgggaaaactggctagccatgtggagaaagctgaagaaggatcacttccttacgcctaaaacaaaaattaattcaagatggattaaagtcttaaacattagacctaaaaccataaaaaccctagaagaaaacctaggctttaccattcaggacataggcatgggcaaggacttcatgtctaaaacaccaaaagcaatggcaacaaaagccaaaattgaccaacgggatctaattaaactaaagagcttctgcacagcaaaagaaactaccatcagagtgaacaggcaacctacaaaatgggagaaaagttttgcaacctactcatctgacaaagggctaatatccagaatctacaaagaactcaaacaaatttacaagaaaaaaacaaacaaccccatcaaaaagtgggtgaaagacatgaacggacacttctcaaaagaagacatttatgcagccaaaaaacacatgaaaaaatgctcaccatcactggccatcagagaaatgcaaatcaaaaccacaatgagataccatctcaaaccagtcagaatggtgatcattaaaaagtcaggaaacaacagatgctggagaggatgtggagaaataggaacacttttacactgttggagggactgtaaactagttcaaccattgtggaagtcagtgtggtgattcctcagggatctagaaccagaaataccatttgacccagccatcccattactgggtatatactgaaaggactataaatcacgctgctataaagaaacatgcgcacgtatgtttatagctgcactattcacaatagcaaagatttggaaccaaactaaatgtccaacaatgatagactgaattaagaaaatgtggcacatatacatcatagaatactatgcagccataaaaaatgatgacttcaggtcctttgtacggacatggatgaaattggaaatcatcattctcagtaaactatcgcaaggacaaaaaaacaaaaaccgcatattctcactcataggtgggaatggaaaaatgagaacaaatggacacaggaaggggaacatcacactctgggatggttgtggggtggggggaggggggatagcattaggagatatacctaatgctaaatgacgagttaatgggtgcagcacaccagcatggcacatgtatacatatgtaactaacctgcacattgtgcacatgtaccctaaaatttaagtatactaataataaaataaataaaaaagaagcattctgagaaaccactttgtgatgtgtgcattcatctcacagaactgaaactttcctttgattcagcagctttgaaacactctttttgtagaatctgcaagtggatatttggagcgctttgaggcctattgtggaaaaggaaatatcctcacacaaaaactacacataagcattctgagaaacttctttgtgatgtgtgcattcaattcacagtgttgaacctgtctttcgattcagcagttttgaaacactctttttgtaaaatctgtaagtggatattggagcactttgaggtctgtagtggaaaaggaaataccttcatccaaaaactacacagaagcattctgagaaacttctttgtgatatgtgcattcatctcacagaactgaaactttcctttgattcagcagctttgaaacactctttttgtagaatctgcaagtggatatttggagcgctttgaggcctattgtggaaaaggaaatatcttcacacaaaaactacacataagcattctgagaaacttctttgtgatgtgtgcattcaactcacagtgttgaacctgtcttttgattcagcagttttgaaacactctttttgtaaaatctgtaagtggatattggagcactttgaggtctgtagtggaaaaggaaataccttcatccaaaaactacacagaagcattctgagaaacttctttgtgatatgtgcattcatctcacagagttgaacctttcttttgattgagcagtttggaaacaccctttttatggaacctgcaagtggatatttggaacgctttgaggcctatggtggaaaaggaaatatcttcacatgaaaactagacagaaacattatgagaaacttctttgtgatgtgtgcattcatgtcacagagttgaacctaagttttgatagaccagttttgtaactctctttttgaataatctgccagtggatatttagagcccttagtggcctatggagaaaaggaaatatcttcacattgaaactacacagaagtattctgagaaacttctttgtgatgtgtgcattcaactcacagtgttgaacctatcttttgattcagcagctttgaaacactctttttgtagaatctgcaagtggatattggagctctttgaggcctatagtggaaaaggaaataccttcacccaaaaactacacagacgcattctgagaaacttctttgcgatatatgcattcatctcagagagttgaacctttcttttgattcagcagtttggaaacaccctttttatagcatctgccagtggatatttggggcactttgaggcctatggtggaaaaggaaatatcttcacataaaaactagacagaagaattatgagaaacttctttttgatgtgtgcattcaactcccagagttgaacctaagttttgatagaccagttttgaaactctctttttgaataatctgcaagtggatatttagagcccttagcagcctatggaaaaaaggaaatatcttcacattaaaactacacagaagcattctgagaaacttctttgtgatgtgtgcattcaactcacattgttgaacgtatctttttttttttattatacttgaagttttagggtacatgtgcacaatgtgcaggttagttacatatgtatacatgtgccatgctggtgtgctgcacccattgaatcgtcagttatcattaggaatatctcccaatgctatccctccctcctcaccacaccccacaactgtccccatagtgtgatgttccccttcctgtgtccatgtgttctcattgatcaattcccacctatgagagaatatgtggtgtttggttttttgttcttgtgatagtttactgagaatgatgatttccaatttcatccatgtccctataaaggacatgaactcataattttttatggctgcatatattccatggtgtatatgtgccacattttcttaatccagtctgattgttggacatttgtgttggttccaagtctttgctattgtgaatagggccacaataaatatacgtgtgcatgtgtctttatagaagcatgatttatagtcctttgggtatatacccagtaatggaatggctgggtcaaatggtatttctagttctagatccctgaggaatcgccatactgacttccacaatggttgaactagtttacagtccctccaacagtgtaaaagtgttcctattccttcacatcctctccagcacctgttgtttcctgactttttaatgattgccattctaactggcttgagatggtatctcattgtggttttgatttgcatttctctgatagccagttatggtgagcattttttcatgtatttttggctgcataaatgtctccttttgagaagtgtctgttcatgtcctttgctccctttttgatggggttgtttttttttttcctgtaaattttttgagttcattgtagattctggatattagccctttgtcaggtgctagattgtgaaacttttctcccattttgtaggctgtctgttcactctaatggtagtttcttttgctgtgcagaagctctttagtttaattagatcccttttgtcattttggcttttgttgccattgtttttggtgttttagagatgagttccttgcccatgcctatgtcctgaatggtaatgcttaggatttcttctagagttcttatggttttaagtctaacgtttaagtctttaatccgtcttgaattaatttttttataaagtgtaaggaaaggatccagtttcagctttctctgtatggctagccagttttcccagaaccatttattaaatagggaatcctatccccattgcttgtttttgtcaggtttgtcaaagatcagatggttgtaaatatacggcattacttctgagggctctgttctgttgcattgatctatatctctgttttggtaccagtagcatgctgttttagttactgtagccttgtagtatagattgaagtcaggtagcatgatgcctccagctttgttcttttggtataggactgacttggcgatgtggactcttttttggtgtcatatgaactttaaagtagttttttccaattctgtgaagaaaatcattggtatcttgatggggatggcattgaatctataagttacttggggggcagtatggcgattttcacgatattgatgcttcctacctgtgcagttttgaaactctcttttgtagcagctgcaagtggatagttggagccctttgaggcctatggcagaaaaggaaatatcttcacacaaaaactgcacaaaagcaatgtgagaaacttctttgtgatgtgtgcattcatctcacaaaggtgaacccttcttttgattgagcagtttagaaacacgctttttgtagaatctgcaagtggatatttggaatgctttgaggcttatggtggaaaagaaaatatcttcacataaaaactacacagaagcattctgagaaacttccttgtgatgtgtgccttcaactcacagagttgaagctatcttttcatagagcagttttgaaactccccttttgtagaatctgcaagtggatatttggagccatttgcagcttatggcgtaaaaggaaatgtcttcacataaaagctacacagaggcattctgataaacttctttctgatgtgtgcattcgtctcacaaagttgaaactttcatttgattaacagttttgaaacaatattttggtagaatttgcaagtggatatttggagcgatttaagtcctattgtggaaaaggaaatatcttcacataaaaactacaaggaaatattctgagaaacttctttgtgatgtgtgcattcaacaaacacagttcaaactttcttttgattgagcagttaggaaagactctttttgtagaatctgcaagtggatctttggagcgctttgtggcctactgtggaaaaggaaatatcttcacataaaaactacccagaagcattctgagaaacaaatttatgatgtgcgcattgaactcacagagttgaacctatcttttgattgagcagttttcagtctctctttctgtagaatctgcaagtggatatttggagcccttttcagcctattttggaaaaggaaatatcttcacataaaaactacacagaagccttctgagaaacttccttggtgtgtgtgcattcacctcacagagttgaagctatcttttcatagagcagttttgaaagtcccctttcgtagaatctgcaagtggatatttggagccatttgtggcttatggtgtaaaaggaaatgtcttcacataaaagctacacagaagcattctgataaacttctttgtgatgtgtgccttcatctcacagagatgaaagtttcatttgattaacagttttgagacaatcttttggtagaatttgcaagtggatatttggagcgatttaagtcctattgtggaaaaggaaatatcttcacttaaaaactacacggaagcattctgagaaacttctttgtgatgtatgcattcatcaaacacagttcaaactttcttttgattgagcagtttggaaagactctttttgcagaatctgcaagtggatatttggagcgctttgtggcgtattgtggaaaaggaaatatcttcacataaaaactacccagaagcattctgagaaacttctttatgatgtgtgcattcaactcacagagttgaacctatcttttgattgagcagttttgaaacactctttttatagaatctgcaagtggatatttgaagcgctttgagtcctattgtggaaaaggaaatatcttcacataaaaactacatagaagcattctcagaaacgtcattgtgatgtgtgtattcatctcacagagttgaaacattcttttgattgagcagtttggaaacagactttttgtagaatctgcaagttgatatttggagcgctttcaggattattgtggaaaaggtaatatcttcacataaaaactacatagaagcattctgagaaacttctttgtgatgtgtgcattcatctcagagagttaaaccatttttttcatagagcagtttagaaacactctttttgtagaatctgcaagtggatatttggagtgctttgaggcctattgtcaaaaaggaaatatcttcacataaaaactaaacagaggcattctgagaaacttgtttgtgatgtgtacattcatctcacagagttgaacgtttcttttgattgagcagttttgaaaccctctttttgtagaatctgcaagtggatatttggagtgctttgaggccttttgtggaaaaggacatatcttcacatagaaactacgcagaagcattgtgagaaaatactttgtgatgtgtgcattcaactcccagcgttgaacctatcttttgattgagcagttttgaatctcactttttgtagaatctgcatgtaaatttttggagccctttccggcctattttggaaaagggaataagttcacataaaaactatatagaagcattttgagaaacattattaggacgtgtgcattcatctcacagagttttacctatcttttgattgagcaattttgaaccacactttgtatagaatctgcaggtggatattttaagcactttgaggccaatcgtgggaaaggaaatatcttcacataaaaactacacagaagcattctgagaaacttctttgtgatatgtgcattcatctcacagagttgaacatttcttttgattgagctgttttgaaacaccctttttgtagaatatgcaagaggatatttggagcgctttgaggccaattctggtaaaggaaataccttcacataaaaactgctaagaagcattctgtgaaacttctttttgatgtgtgcattcaattcacgcagttgaacctaccttttgattgagtagttttgaaactctctttttgtagaatctgcaagtggatattaggagcacattgaggcctattatgaaaaaggaattatcttcacacaaatctacaaagaagcattctgacaaaatactttgtgatgtgtgcattcaacacaccgagttgaaaatttcttttgattgagcagttttgaaactctctttttgcagaatctgcaagtgaatatttggagacttttgcagcgtgtgctggaaaagtaaatatcttcacataagaattactcagaagcattctgataaacatttggtgatgtgtgcattcatctaatagtgttgaacatatcttttgattgagcagctttgaaactctttttttctagaaactgcaagtggatatttggagccctttgcggcctatggtgaaaaaggaaatatcttcaaataaaaactacacagaagcgttctgagaaacatctttgtgatgtgtgcattcatctcacagatttgaatatttcttttgattgaacagttttgaaacactctttttgtagaatctgcaagtggatatttggagagcattgcggcctctagtggaaaaggaaatatcttcatataaaaactacacagaggcattctgataatcttctatgtgatgtgtacagtcatgtcacagagatgaaactttctttcgattgagcagattggaaacactctttttgtagaatctgcaagtggatgtttggagagctttgaggcctcgtggaaaaggtaatatctttacgtaaaaactacacagatgccttctgatgaacttctttttgatgtatgccttcaactcatagaactgaacttatctgttgacagagcagttttgaaaaccattttttgtagaatctgaaagtggatatttggagtcctttgtggcctatagcggaaaaggaaataccatcacataaaactccacagaagaattctgtgaaacttctttttgatgtgtgcattcgtctcatagagttgaacctttctttcaattgagcagttatgaaacaatctttttctagaatctacaagtggatatttggagcgctttgaggccaatagttttaaaggaaatatcttcacataaaaactacacagaagcattctgaggaatttctttgtgatgtgtgcattcatctcacagagttgaaacttttttttttattgagcagttttgaaacactcttttcgtagaatctacaagtggatatttggagtgctttgaggtctattgtggaaaaggaaatttcttcaaataaaagctacatggaaggagtctgagaaacttctttgtgatgtgtgcattcatgtcgcaggatgaaagctttcttttgattgagcagtttggaaatactgtttttgtagaatctgcaagtggatatttggagcttttagaggcctacggtagaaaaggaaatatcttcctataataactacatagaaacattctgagaaacttttttgtgctgcgtgcattcatctcatagagttgaacatttcttttgattgagcagtttttgaaacactgtttttatagaatctgcaagtgcacacttgtggctatttgtggtctatggtggagaaaggatatatcttcacataaaaactgcacagaagcattctgagaaagttccttgtgatgtgtgcattcatctcaccgagttgaacctatgttttgatagagcagttttgaaacactctttttgtagaatctgtaagtgcatattttgagtgctttgaggcctatggtggaaaggaaatatcttcacataaaaactacacagaagcattctcaaaacttctttgtgatgtgtgcattaaactcacagatttgaacctatcttttaatagagcagttttgaaactctcttttgtacaatctgcaagtggatatttggagacctttgcggcctatgatagaaaagggaatgtcttcacataaaaactacccagcagcattctgagaaactactttatgatgagtgcattcgtctcacagagttgaacttttccttcgattgagcagttttgaatcactctttttgtagaatttgcaagaggatatttggagcgctttgagacctattgtggaatgggaaatatcttcatgtaaaaacttcccagaagcattctgagaaacgtctttgtgatgtgtgcattcatctcacagagttgaaagtttcttttgatgagcagtttggaaacagtctttttgtaccatctgcaaatggatatttggagccctttgaggcctatgttggaaaaggaaatgtcttcacataaaaactacacagaagcattctgagaaacttctttgtgatgtgtgcattcatttcagagagttgaacttttcttttgattgagcagttttgaaactctcttcttgtagaatctgcaagtgtatatttgaagcgctttgaagcatgtattggaaaaggaaatatcttcacataaaaactagatagaatcattctgagaaacttccctgtgatatgtgcattcatctcacagtgttgaaactttcttttgattgagcagtttggaaacagtgtttttgtagtatctgtaaatggatatttcaggtgcttagaggcctatattggaaaaggaaaaatcttcacaaaaaaactagacagaggcattctgagaaacttcattctgcgatgtgcttttttctcacagagttggactgttcttttgattgagcagttttgaaacactgtttttgtagaatctgcaagtgcatatttggagcacttggaggcctattgtggaaaaggaaatattttcttataaaaactagacagaagcattctgagaaacttctttgtgatgtgtgctttcagttcacagaggtgaaactttctcttgattgagcagtttggaagtagtctttttgtagcatctgcaaatgaatatttgaatcgctttgaggcctatgttagaaaaggaaatatcttcatgtaaaatctagacagtagcattctgagaaacttctttgtgatgtgtgcattaatttcagagagttgaacttttcttttgattgagcagttttgaaacactcttcttgtataatctgcaagtgtatatttggagcgctttgagccatgtagtggaaaaggaaatgtcttcacataaaaacttgacagaatcattctgagaaacttctttgtgatgtctgcattcaactcacagtgttgaaactttctttctattgaggagtttggaaacagtctctttttagtatcttcaaatggatatttcgagtgcttagaggcctatagaggaaaaggaaaaattttcacaaaaaaactagacacaggcattctgagaaacttcattgtgaggtgtgcattcatctcacagagtttgactgttcttttgattgagctgttttgaaacaatctttttgtagaatctgcaagtgcatatttggagtgctttgcagcctatggaggaaagctaatatcttcacctggaaactagacagaagccttctgggaaacttctttgtgatgtgtgcattcacctcacagagttgaacctttcttttgattgagcagttttgaaacactctttttgtagaatctgcatttggatatttgcagtgatttgaagcctacggtggaaaaagaaatgtcctcatataaaaactagacagaagctttctgagaaacttctttgtgatgtgtgcatgcacctcagagagttgaacctttcttttgattgagcagttttgaaacactctttttgtagaatctgcaattggatatttgcagtgatttgaagcctatggtggaaaaagaaatgtcttcatataaaaactagacagaagccttctgagaaacttctttgtgaggtgtgcattcaactcacagagttgaacctttcttttgattgagcagtttggaaaccgtctttttgtagtatatgcaaattgatattttgagcactttgaggcccatggtggaaaaagaaatatcttcacataaatactagacagaagccttctgagaaacttctttgtgatgtgtgcattcatctcacagagatgaacctttcttttgatagggcagttgtgaaacactcctttgtagaatctgcaagtggatatttggagcgctttgcggcccatagtggaaaaggaaatatcttaacataaaaccagacagaagcattctgagaaacttctttgtggtgtgcctttatctcactaagttgaacatttcttttgattgagcagttttgaaacagtctttttgtagtatctgtaaattgatatttcaagcgcttcaaggcctatggtggaaaagcatatatcttcatataaatactggacagaaggattctgagaaacttctttgtgatgtttgcattcatatcatagagttgaaccttacttttcactcaacagttttgaaacactctgtttgtagaatgtgcaggtggatatttggagcgctttgcagcctatagtggcaacgaaaatatcttcacataaaaactagacagaagcattctgacaaacttctctgtgatgtgtgcattcaactcacagaattgaacctttcttttggttaagcagtttagaagcagtcgttttgtggaatctgcaaagggatatttgtgagcccattgaggcctctggggaaataggaaatatcttctcattaaaactagacagaactttctgagaaactgctttgttatgtgtgttttcacctcaaaaggttaaacctttcttttgattgagcagttttgaaacagtctttttgtagaaactgcaaatagatatttggagccctttgaagcataaggtgaaaaaggaaatatcttcccataaaaactattcagaagcattctgagaaacttctttgtgacgtgtgcattcatctcacagagttgaacattacatctgattgagcaatttggaaacagtcgttttgtggaatctgcaaagggatatttgtgagcccattgaggtccctggggaaaaaggaaatatcttcacattaaaactagacagaaactttctgagaaacttctatgagatatgtgctttcaactcacagatttgaaacattcttttgattgagcagtttggaaatagtctttttgtagattctgcaaatggacatttggatgctttgaggcctatggtgaaaaaggaaataccttcccataaaaattaggcagaagcattctgacaaacttttatttgatgtgtgcactcatctcacagagttgaaactttcttttgtttgagcagttttgaaaaaatctttttgtagaatctgcaatttcatatttggagcactttgtggcctataatgggaaaggaaatatcttcacaaaaaaactagccagaagcattctgacaaactactttggatgtgtgcattcatctgagggaggtgaatctttcttttcattgaacagttttgaaacactccttttgtagaatctgcaagcagatatttggagtgctttgagacctatggtggaaaagtaaatatcttcacataaaaagctagacagaagcattctgagaaacttcttagtgatgtgtgcattcatctcaccgagttgaaactttcttttgattgagcagtttggaaacagtctttttctagaatctgcaagtagatattcggaacgctttttgttgtatagtggaaaaggaaataacttcacataaaaactagacagaagcagtctgagaaacttctttatgatgtgtgcattcaactcacggagtttaacatttcttttcattgagcagttttgaaaaactctttttgtattatctgcaagtggatatttggagcacatttaggcctatggttgaaaaggaaatatcttcacataaaaactagacagaagcattttgagaaacttcttgatgtctgcattcatctcatagaggtgaaacatatttttggtgagcagctttgaatcactctttttatagattctgcaagtggatatttggatcagtttatgttgtgtactggaaaagggaatatcttcacgtaaaaactagacagaaacattctgagaaacttctttcttttgtgtgcattcaactcagagacttgaacctttcttttgattgagcggtttggataccatctttttagtgtctgcaaattgatatttggagtgatttgaggcctgtagtagaaaaggaaatatcttcatataaaaactagacagaagcattctgagaaacttctttgtgatgtgtgcattcatctcacagagttgaacctttcttttgattgagcagttttggatcactctttttgtacaatctgcaagtggatatttggagtgctttgaggcctatggtagaaaaggaaatatcttcacataaaaagtaggcaggaacgttctgagaaacttctttgtgatgtgtgcattcatcttacagagttgaaattttcttttggttgagcagttttgaaacacactttttgtagtatctgcaagtggatatttggggcgctttgacgcctattgtggaaaaggaaatatcttcacttaaatactacaaagaagcattctgagaaacttctttgtgatgtgtgcagtcatgtgtcaaagctgaacctttcttttgattgaccagtttggaaacagtcttttggtagtatcggcaaatggatatttggagcgctttgaggtctatggtggaaaaggaaatatcttcacataacaactaggcagaaacattctgagaaacttctttgtgatgtgtgcattcatctcagagagtttaaccattcttttgattgagcagttttgaaacactctttttgttgaatatgcaaatgaatatttggagctctatgaggcctatagcttaaaagaaaatatcttcacataaaaactacacagaagaattctgagaatcttctttgtgatgtgtgcattcatcttcatcttacagagttgaacatttcttttgattgaacagtttggaaacactctttttgtagaatctgcaagtggatatttggagcactttaagtactatgatggaaaaaatatcttcacataaaaattagacagaagcattctgaggaacttctttgtgatgtgtgcattcatctcactgcattgaatgtttcttttgattgagcagtttggaaacagtcgctgtgtggagtcttcatagggatatttgagctcactgaggcctatgggcaaataggaaatatcttcacataaaaattagatggagtctttctgagaaacttctttgtgatatgagctttcatctcacaaagttgaaactttcatttgaatgagcagtttggaaactgtcttcttgtagaaactgcaaattgatatttggagcgctttgaggccagtggtgaaaatggaaatgtcttcatttaaaaactagacagaagccttcctagaatcttctttgtgatgagtgcattcatctcacataattgaacctttcttttgattgagcagtttggaaatagtcgttttggagaatctgcaaagggatatttgtgagtccattgaggcccatgggataatgggaaatatcttcacataaaaactaggcagaaactttctgagaagctggtttgtgaggtgtgctttcatctcacagagttgaaactttcttttgagtgagcagtttagaaatagtcttttttttagaatctgcaaatggatatttgaggcactttgaggcctatgttgaataaggaactatcctcgcttaaaaactagacagaagcattctgagaaacatctttgtgatgtgtgcattcatatcatggcgttcaaccttgctttagattgatcagtttggaaacagtctttttgtagtatttgcaaagggagattttgagcgttttgaggtctatggtgaaaaaggaaatatcttcacataaaaagtagacaaaagcattctgagaaacatctttgtggtttgtgcattcatctcccagagttgaaaatttctttttattaagcagttttgaaacactctttttgtagaaaatgctactggatgtttggagtgctttgaggcctgtggcagaaaaggggtatcttcacataaaaaccagacagaagcattctcagaaacttctttgtgatgtgtgcattcatcttagagagttgaatatttcttttgattgagcagtttggaaacattcgttttgtaaaatgtgcaaagggatatttgtgagcccattgaggcttatgggaaaataggaaatgtcttcacataaaaacttgccggaaacttgttgcaaaactactttgtgatgtgtgctttcacctcaaagagttgaaactttcttttgatagagcagttttgaaatagtctttctgaagaatctgcaaatggatatttggagcgcattgaggcttatggtgaggaaggacatattttcacataaaaactcgacagaagcattctgagaaattctttgtgatgtgtgcattcatctctcagagttcaaactttcttttgatagagcagtttggaaacaatctttttatagtatctgcaaagtgatatgtggagcacttggaggcctgcattgaaaaaggaaatatcatcaaataaaaactagacaaaagcattatgagaaacttctttgtgaggtgtgcattcatctcatagagttgaactattcttttgattaaggaattttgaaacactctatttgtagaaaatggaactggatatttggagtgcgttgaggcctgtggtggaaaaggaaatatcttcacataaaaactagacagaaactttccgataaattactttgagacgtgtgctttcatctcacagagttgaaaatttcttttgattgagctgtttggaagcatacttttcatagtaactgaaaatggatatttgtagcactttgagtcatatggggaaaaatgaaatatcttcatataaaaactacactgaaccattgtgggaaacttctttctgatgtgtgcattcatttcacagagttgaacctttcttttgattgagcaccttggaaacaacctttttgtagtatcttcaaaaggatatttggagtgctttgaggcctatggtgaaaaaggaaatatcttcacaaaaaaactacagaagcattctgagaaacttctctgtgatgtgcgcatgcagctcccagagttgaatctttcttttgattgagcagttttgaaacactgtttttttagaatctgcaagtggatatttagagcgctttgaggcctgtggtggaaaaggaaatatcttcacataaaaactagacaaaaacattctgagaaacttatctgtgatgtgtgtattcatctcagagagttaaacctttcttatgattgagcagttttgaaaacagtcgttttgtagaatcttcacagggatacttgagagcccattgaggcctatggggaaataggaaatatctttgcataaaaaatagacagaaactttctgagaaactaatttgtgatgtgtgcttttatctcacacagctgaatctttcttttgattgagaagttttgaaagagtctttttgtagaatctgcaagtggaattttggagcactatgaggcctgtggtgaaaaaggaaaaatcttcatagaaaaactagacagaagcattgtgaaaaacttatttgtgatgtgtgcattcgactcacagagttgaacctttcttttgattgtgcagtttggaaacagtctttttgtacaatctgcaactggatatttggagccctttgaggcttatggggaaaaggaaaatatcttcatataaaaactagacagaagtattctgagaaacttctttgtgatgtgtgcattcatctcacagagtggaacatttcttttgattgagcagtttggaaactgtcattttgtagaaactgcaagtggatatttggagttatttgcagcctaaggtggaacaaggaatatcttcatgtgaagacgagagagaggcattcctagaaacttctttttgatgtgtgcattcatctcacagagttgaacatttcttttgattgagaagtatggaaacagtctttttgtagaatctgcaaagggatgtttgtgagtgcattgaggcctatgggcaaacatgaaatatcttcacataaaaactagaaagaaacattatgaaaaacttcttggtgatgtgtgctttcatctcacacagttgaaactttcttttcattgagcagtttttacacagtctttttgtggaatctgcaaatggatatttggagtgctttgaggcctatcatgaagaaggaaatatcttcacataaaaaccatacagaagcattctgggaaacttccttgtgtgccttcatctcagagagttaaacctttcttatgattgagcagttttggaaacagtcgttttgtagaatcttcaaagggatacttgagagcccattgaagcctatggggaaataggaaatatcctcacataaaaaaaaaaacagaaactttctgagaaactaatttgtgatgtgtgctttatctcacagagttgaacatttcttttgattgagaagtttggaaacagtctttttgtagaatctgcaaagggatgtttgtgactgcattgaggcctatgggcaaaaaggaaatatcttcacataaaaactagaaagaaacatcatgaaaaacttctttgtgatgtgtgctttcatctcacacagttgaaactttcttttcattgagcagtttttacacagtatttttgtggaatctgtaaatggatacttggagcactttgaggcctatggtgaagaaggaaatatcttcacataaaaaccagacagaagcattctgggaaacttccttgagatgtgtgccttcatctcggagagttgagactttcttttgttagaccagtttgaatatagactttttgtagaatgtgcaagtggatatttggagtgtcttgaggccaatggtggaaaaggaaatatcttcacataaaaactagatagaagcattcttagaaacttcgttgtgatgtgtgcattcttctcacagtgttgaacatttctctttattgagaactttggaaaccgtccttttgtagaatctgcaaagggatatttttgagcccattgaggcctatgaggaaataggaaatatcttcacataaaaactagtcagaaactttctgagaaacttctttgtgatgtgtgcattcatcttacagtggtgaacctttcttttgattgagcagtttggaaaccatctttttgtagtatctgcatgtgggtattttgagtgctatgtggtctatggtgaaaaagcaactatcttcaaataaaaactagacagaagcattctgagaaacttctttctgatgtgtgcattcatctcacgaaattgaacctttcttttgattgagcaattgggaaacagtctttttgtagtatctgcaagtgtatatttggaatgatttgaggcctatggtgaaaatggaaatatcttcacataaaaactacagagaaacattctgagaaacttctttgtgatgtgtgcattcatctcatagagttgaaactttcttttggttgatcagtgttgaaacactctttttgtgaatctgtaagtagatacttggagcggtttgaagcatatggttgaaaaggtagtatcttcacataaaaagtagacagaagcattctgagaaacttctttgtgacatgtgcattcatctcacagatttgaaactttcttttaattgagcagttttccaagcagtctttttgtaaaatctacacatggatatttggagcactttgaggtctatggtgaaaaagggactatcttcacattaaaactagacagaagcattctgagaaacttctttgtgaggtgtgcattaacctcacagagttgaacctttcttttgattgagcagttttggaacagtctttttgtagtatctgcaaacggatattgtgagcgatttgattcctatggtgaaaaaggaaatatcttcccataaaaactacacagaagaattgtgagacacttctttgtgatgtgtgcattcatctcacagagttcaacctttcttttcattgagaagtttggaaactgtctttttgcagaatctgcaagtggatatttggagcactttgtggccttcagtggaaaaggaaatatattcacataaaaactggatggaagcattctgagaaacttctttttaatgtgtgcattcatctcacagagttgaacatttgttttgattgaacagtttggaaagcgtcgttttgtgggatctgcaaagggatatttgtgagcccattgaggcctatgggaaaataggaaatattttcacataaaaactagacagaaactttctgagaaacttctttgtgatgtgtactttcatctcagagttgaaattttcttttttttgagcagtttggaaatgtctttttgtagagtctgcaaatggatatttggagcgctttgaggcctatggtgaaaaaggaaatatcttcacataaaaactagacagaagcattctgagaaacttctttggatgtttgcattcatctcacaggcttgaatatttcttttgattgagctgtttggagacagtctttttgtagtatctgtaaatggatattttgagtgctttgtggcctatggtgaaaaacgaaatatcttcacataaaaattagacagaagcattctgagaaacttctttgtgatgtgtgcattcatctcatggagctgaacctttcttttgattaaacagttttcaaacactctctttgtcgaatctgcaagtggatatttggagcactttgagtcctgtggtggaaaaggaaatatcttcacataaaaactaggaagaagcattctgagaaacttctttgtgatgtgtgcattcatttcacagaggtgaacatttcttttgattgagtcgtttggaaacagtcattttgtagaatctgcaaagggatatttgtgatccctttgaggcctatggggaaataggagatatcttcacataaaaactagacagaagcattctgagaaacatctttttgatgttgtgtccagaattggtgggttcttggtctcactgacttcaagaatgaagccccgtacccttatggtgagtgttacagttcttaaaggtggcgagtctggtgtttgttttttctgatgttcagatgtgttctgagtttcttccttcttgtggttttgtagactcgctagctcaggagtgaagctgcagaccttcacagtgagtgttacagctcttaaggcagtgcatctggagttttccattcctcccagtggactcgtggtctcggtcacttcaggagtgaagctgcagagcttcaccttgagtgttgcagctcataaaggcagtgtggacacaaagagagtgagcaccagcattatttattgcaaacagtgaaagaacaaagcttccacagtgtagaagggtccccaagcaggttgccactgctggctctggcagcctgctttttattctcttatctggccccacccacttcctgctgatttgtagagcccagtggactgttttgacagggcactgattggtgcatatacaatccctaagctagacacaaaggctcttcatgtccccaccagattagctagatagagtgtcaacacaaagttatccaaggccccatcagagtagctagatacacggtgtcgattggtgcattcacaaaccctgagctagacacaggatgctgattggtatgtttacacactttgagctagatacagagtgcgattggtatatttacaacccctgggctagacataaaagttctccaagtccccatgagaatagctagatacagcatgtcaattggtgcactcaaaatccctgagctagacacagggtgctgattggtgtgtttacaaaccttgatctagatacagagtgctcattatgtgagcactggaaatatatgaagatatttccattttcaccacaggtctcaaactgctctcaaatatccctctgcatattctgcaaaaaactgtgttcaaactgttcaatcaaaagaaattttcacctctgtgagatgaatgcacacatcacaaagaagttcctcagaattcttctgtctagtttttatatgaagatacttcccttttcaccataggcctcaaagcactccaaatatccatttgaagattccacaaaaagactgttaccaaactgctcaaccagaagaaaggttcaattctgtgagatgaaagcacacatcacaaaggggtttggcagaaagcttctgtctactttttatgtgaagatacttctttttcacctgaggtggcaaagagctcagaaatatcccaatgcagattgtacaaaaagacggtttccaaacagctgaaccaaaaggaagtttcaactctgcgagatgaatggacacctcacaaagaagtttctcaaaaagtgtctgtctagcttttacatgaaggtatttccttttccactatatgtctcaaactgctcacaaatattcctctgcagaatctacaaaaagtctgtttccaaactactcaatcaaaagaaagattcagctcagtgagatgaatgcaaaccccacaaagaagtttctcagaatgcttccgtctagtttttatatgaagaaatttcctcttccaccataggccccaaagcactccaaatatccattcacagattctacaaaaagactctttcaaaacttctcaatcaaaagaaagattcagctgtatgagatgaaagcacacatcacaaagaagtttctcagaatgcttctgtctattttttatgtgaagatatttcatattacaccccaggcctcaatgacatcacaattattcctttgacgattctacagaaaactgtttccaaactgctcaatgaaaagaaaggttcaactctttgagatgaatgtgcacatcacaaagcagtttctcagattacttttgtctagctttcatgtgaagatatttacattttcaacataggcttcaaaccgctcataaatatccatctccaaattctacaaaaagactgtttctaaactgctaaatcaaaagaaagtttcaactctgtgtgatgaatgcagacatcacaaagaagtttctcagaaacgttctgtctagtttttatgtgaagctatttcctatttcaacatgggcctcaaaggcctcgcaaatatccctttacagattctacaaaaagattgtttccaaactgctaaatcaaaataaaagttcaaccctgtgatatgaatgcacacatcacaaagcagtttctcagaatgcttctgtctagtttctatgtgaagatatttccattttcacaataggcacaaaactgctcacagataaccctctgcatattctgcaaaaagactgcttccaaactgctcaatgaaaagaaatattcaactctgggagataaatgcagtcatcacaaaaaagtttcaaagaaatcttctgtttagtttttatgcgaaaatattagctttttcaccataggtctcaaagaggtccaaatatacatttgcaaattccacaaaaagatggtttccaaactgctgaatcaaaagaagatctcaagtctgtgagatgaatgtacacatcacaaagaagcttctaagaatgtttctgtctagtttttatgtgaagatatttcccttttcaccacaagcctcaaagcgctccaaatatcaatttgctgatactataaaaagactgttacaaaactcctcaatcaaaacaaagtctcaagtctgtgagatgaaagcaaatatcacagagaagtttggcagaaagcttccaccaagtttttatttgaagatatttctttttcaacataggctgcaaaccactcagaaatatagctttgcagattgcacaaaaacactgtattctaacttctcaaacaaaggaaaggttcaactctgagagatgaaagctcacatcacaaagaagtttctcagaatccttctgtgttgtttttatgtgaggatatttcctatttcaccttgggcctgaaaggtttcacaaatatccctttgcagattctagaaaaagactgtctccaaactgctcaatcaaaagaaaggttcaactttgtgagatgaatgcacacatcacacagcagttttgcagaatgtctctgtctagtttttatgtgaagatatttccattttcaccgtaggcctcaaacagctgagaaatatccctctacaaatgctacaaaaacactgtttccaaactgctcaattaaacaaaaggtgcaacagtgtgaggtgaatggacaaatcacaaggaagttgctcagaaatcttccattccttttttatgtgaagatattagctttttcactttaggcctcaaagaggtccaaatatctatatgcagatacgacaaaaagacttttttcaaactgctcaatgaaaagaaaggttcaacactgtgagaagaaggcacaatcaaaaagaagtttctcagaatgattctgtgaagtttttatgtgaagatatatcctttccagctataggccccaaagaactccaaatatccatttgaagatactacagaaagagtgtttccaaactgctcaatcaaaagaaatgttcaacactgtgagtagaatgcatacatcacgaagacgtttctgagaatgcttctgtctagacttatgtgaagatatttccttttccaccgtaggcccaaaagccccccaaatatccacttgcagatactacaaaaagagtgtttctaaactgctcaagaaaaagaaaggttgaactatgtaagatgaatgtacacatcacaaaaagtttctgagaatgcttctgtctagattttatgtgaagatatttccttctccaccgtaggcctcaaaccactccaattatccgtttgcagataatacagaaagagtgtttccaaactgctcaatcaaaagaaaggttcaactctttgagttcaatgcacacatcacaaagcagtttctgagaatgcttctgtctagttttcatgtgaagatatttccttttctaccataggcctccaagagctccaaatatccacttacagattctccaaaaagagtgtttcaaactgctctatcaaaaggagggttcaactctgttagttgaatgcacacatcacaaagaagtttctgagaatgcttctgtctaatttttatgtgaagatattcccgtttccaacaaaggcttcaaagcggtccaaatatccacttgcagattctaccaaagagtgtttccaaactggtcaatcaaaagaaagtttctactctgtgaggggaatgcacacatcacaaagaagttaatgagaatgcttctgtctactttttatatgaagatattcccttttcaactataggcctcaaagcactccaaatatccatttgcagataatagaaaaaaagggtgttttcaaactactcagtcaaaagaaaggttcaactctgtgagttgaatgcacccatcacaaagaattttgtgagaatacttctgtctagttttcatgtgaagatatttccttttccaccatagccctcaaagccctccaaatatccacttgtagattctacaaaaagagtgtttccaaactactgaatctaaaggaagattcaactctgtgagatgaatgcacacatcacaaagtagtttctcagaatgcttctgtctaccctttatatgaagatatttccttttcaactacaggcctcaaagcgctccaaatatccacttgcagaaactaactgcaaaaagagtgcttctaaactgctcaatcaaaagaaaggttcaattttgcgagtttaatgcacacatcacaaagaagttactgagaatgcttctgtctagttttcatgtgtagatatttccttttccaccacaggcctcaaagcgctccaaatatgcacttgcagattctacaaaaagagtgtttaaaactgctcaatcaaaagaaatgttcaactctgtgagatgaatgcacacatcccaaaaaaatttctcagaatgcttctatctactttttatgtgaagatatttccttttcagctattggtcacaaagcattccaaatatccatttgcagatacaactaaaagattttttccaaactgctcaatcaaaagaaatgttcaaccttctgagttgaatgcacacatcacaaagaagtttctgagaatgcttctgtctagtttttatgtgaagatatttccttctccaccataggcttcaaaccactccaattatccatttacagatactacaaaaagtgtttcaaactgctcaatcaaagaaagcttcaactctttgagttgagtacacacataacaaagcagtttctgagaatgcttctgtctaattttcttgtgaagatatttccttttccaccataggcctcaaagcactccaaatatccacttgcagattctacaaaaacactgtttcgaaactgctcaatcaaaacaagtgttcaaacctctgagttgaattaaaacatcacaaagaagtttctgagaatgcttctgtctagtttttatgtgaagatatttccttttccactataggccacaaagcgctccaaatatccacttgcagaccctacaaaaagagtgtttcaaaactgctcagtcaaaagaaaggtcgaactctgtgagatgaatgtacacatcagaaagaagtttctcagaatgcttctgtctagtttttatatgaagatatttccttttcaacaatagacttcaaagggcttcaaatatccattagaagatactacaaaaaaaagagtgtttccaaacttctcaatcaaaagaaaggttcaactctgtgagttgaatacacacatcacagagaagtttctgagaatgcttctgtctaatttttatgtgaagatatttcctttttcaccataggcctcaaactgctccacctattcacttgcagattctaaaaaaagagtgtttcagaactgctcaatcaaaagaaggattcggctctgtcagatgaatgcacacatcacaaagcagtttctgagaatgcttctgtctagtttttatgtgaagatatttccttttccaccatagacatccaagggctccaaatatccaccggcagtttctacaaaaagagtgtttcaaagctgctcaataaaaagaatatttcaactctgtgagatgaatgcacacatcacaaagaagtttctgagaatgcctctgtctggttttggcatgaagatatttccttttccacaataggcctcaaagcgctccaaatatccacttgcagattctataaaaagagtgtttcaaaactgctcagtcaaaagaaagactcaacactgtgagatgaatgcacacataacaagaagtttctcagaatgcttctgtcaagtttttatgtgaagatatttccttttcaattataggcctcaaagtgatccaaatatccattggtggttactacaaaaaagaatgtttccaaacttctcaatcaaaataaatgttcaaatctgtgagttaaatgcacacatcacaaagaagtttcttagaatgattctgtctactttttatgtgaacatacttccttttccaccataggcttaaagcactaaaaatatccacttgcagattctacaaaaagagtgtttcaaaactgctcaatcaaaagaaaggttcaactctgtgaaatgaatgcagacaccacaaagtagtttctgagaatgcttcagtctagtttttatgtgaagctatttccttttccaccattggcctcaaagtgctccaaatatccacttgcagatactacaaaaaagtgtttcaaaactgctcagtcaaaagaaaggttcaactcagtgtgatgaattcaaacatcacaaagaagttaatgagaatgcgtctgtctagtttttatgtgaaggtatttccttttcagctataggcctcaaagggctccaaatatccatttgcagttacaagaaaaaaagagtgtttccaaactgctcaatcaaaagaaaggttcaactctgtgagttgaatgcacacataacaaagaagtttctcagaatccttcagtctagtttttatctgaagatatttccatttccaccatggacatcaaagtgctccaaatatccactgtcaagttctacaagaagagtgtttcaaagctgctcaataagcagaaaatttcaactctgtgagatgaatgcacacatcacaaataagtttctgagaatgcttctgtctagtttttatgtgaagatatttccttttccaccataggcctcaaaactctccaaatatccacttacagattctacaaaaagagtgtttcaaaactgctcaatcaaaagaaagactcaactctatgagatgaatgcacacacaacaaagaagtttctcagaatgcttctgtcaagtttttatgtgaagatatttccttttcaaatataggcctcaaagcaatccaaatatccattggcggatactacaaaaaagagtgtttccaaactgctcaacgaaaagaaagactcaactctgtgagttgaatccacgcaccacaaagaaggttctcagaatgcttctgtatactttttatgtgaacatatttccttttccacaataggtctcaaagcaatcaaaatatccacttgcagattctacaaaaagcatgcttcaaaactggtcaatcaaaagaaaggttcaactctgtgagatgaatgcacacatcacaaagaagtttctgagaatccttctgtctagtttttatgtgaagatatttccttttcagctatagaccccaaagtgctccaaatatccatttgcagatagtagaaaaaaagaatgtttccaaattgctcaatcaaaagaaatgttcagatctgtgagttgaatgcacgcatcacaaagaagtttctgagaatgcttctgtcttgtttttatgtgaagatatttcctttcccaccatgggcctcaaccacttgaagtatacacttgcagattctacaaaaagagtgtttcaaagctgctctatcaaaagaaaagttcaactctgtgagatgaatgcacacatcacaaagaatttaatgagaatgcttctgtcaagtttttatatgaaaatattgacttttcagctataggacacaaagcgctccaaatatccatttgcagatactagaaataaagggtgttttcaaactgctcaatcaaaagaaaagttcaactctgtgagttgaatgcacccatcaaaaagcagtttgtgagaaagcttctgtctagtttttatttgaagatatttccttttccatcataagcctcaaagtgctactaatatccacttgcagatactacaaaaagagtgtttcaaaactgctctatcaaaaggaaggttcaactgtctgcattgaatggacacatcccaaagaagtttctgagaatgcttctgtctagtttttgtgtgaagatatttccttttcagctatagaccccaaagcgctccaaatatccatttgcagatagtagaaaaaaagaatgtttccaaactgctcaatcaaaagaaatactcaaatctgtgagttgaatgcacgcatcacaaagaagtttctgacaatgcttctttcttgtttttatgtgaagatatttcctttcccaccatgggtctcaaagccctcgaaatatacacttgcagattctgcaaaagagtgtttcaaaactgcttaatcaaaagaaagactcaactctgtgagattaaggcaaacatcagagttagtttctcagaattcttctgtctagtttctatgtgaaggtatttccttttcaactataggcctcaaagcactccaaatatccatttgcagatactaactgcaaaaagagtgtttccaaaccactcaatcaaaagaaagtttcaattctgtgatttcaatgcacacatcacaaagaagtttctcagaatgcttctgtctagtttttatgtgaagatatttccttttccaccataggcctcaaagcgctacaaatatccacttgcagatcctacaaaaagagtgattcaaatctgctacatcaaaagaaaggttcaactctgtgagatgaatgcacacatcacaaagtagtttcccagaatgcttctgtctagtttttatgtgaagatatttccttttcagctataggcctcaaagcgatgcaaatattcatttgcagatactataaaagattgtttccaaactgctcaatcaaaagaaaggttgaactctttgaggtgaatgcacgcatcaaaaagaagtttctgagaatgtttctgtctagtttttatgtgaagatatttccttttccaccattggtttcaaagcgctccaaatatcctcttgtgtatcctacaaaaagagtttttcaaaactgctcaatcaaaagaaagtttcaactctgtgagatgaatgaacagatcacaaagaagtttctgagaatatttctgtctagtgttcatgtgaagaaattaccttttgagctatagtcctaaagcgctgcaaatatccatttgcagatactaaaaaaaaagatggtttccaaactgcttaatcaaaaaaagttcaactctgtgagttgaatgcacacatcacaatgaagtttctgagaatgtttctgtctagtttttatgtgaagatatttccatttccatgacaggcctcaaagtgctccaaatatccacttatagattctacaaaaagagtggttccaaactgctgtatctaaagaaagattcaactctgtgagataaattcacacatcacaaagtagtttctcagaatgcttctgtcttgcttttatgtgaaaatagttccttttcaactataggcctcaaagcgctccgaatatccatttgcagatactaactgcaaaaagagtgcttccaaaccgatcaatcaaaagaaatgttcaattctatgagttgaatgcatacatcacaaataagtttctgagaatgcttctgacgagttttcatgtgaagatatttccttttccaccataggcctccaagcactccaaatatccacttgtagattctaaaaaggagtgtttcaaaattgttcaagtaaaagaaaatttcaactctgtgagatgaatgcacacatcacaaagaagtttcttagaataattctgtctagtatttatgtgaagaaatttccttttcgactataggcctcaaagtgctccaaatatccatttgcagatgctacaaaaagagtgtttctaaactgctcaatcaaaagagacattgaactctgtgagttgaatgaacatatcacaaaaaagtttctgagaatgcttctgtctagtttttatgtgaagatatttcctttaacttcataggcctcaaagtgctccaaatatccacttgcagattagacaaaaagagtgtttcaaaaccgctcaatcaaaagaaggtttcaactctgagatgaatgcacgcttcacaaataaatttttcagaatgcttcagtctaatttttatgtgaaggaatttccttttcagctacatgcctcaaagtgctccaaatatcaatttacagatacaacaaaaagagtgtttccattctactcaatcaaaagaaagattcagctttctgagttgaatgcccacatcacaaagaagtttctcagaatacttctgactagtttttatgtgaagatattcccttttccaccataggcttctaagccatcaaaatatgcacttgcaaatactacaaaaggagtttttcaaaactgctcaataaaaagaaaggttcaactctgtgagatgaatgcacacacacatcacaaagaagtttgtcagaatgcttctgtctagtttttatgtgaagatatttccttttcagctataggactataagcgctccaaatatccatttgcagatactacaaaaacagtgtttccaaactgctaaataaaaagaaacttcaactctgttagttgaatgcacaaatcacaaggaagtttctgagaatgcttctgtctagtttttatgtgaagatatttacctttccaccatatgcctgaaagtgctccaaatatctccttgcagattctacaaaaagagtgtttcaaatctgctctctgagaagaaaggttcaactatgtgagatgaatgcacacatcacaagtaagtttctcagaatgcatctgtccactttttatgtgaagatatttctttttcaactataggtctcaatgctctccaaatagccacttgcagattctccaaaaacagtgttgaaaactgctcaatcaaaagaaatgttcccatctgtgagatgaacccatacatcacaaataagtttctcagaatgcttgtgtctagttttactgtgaagatatttccttttccaccatagacctcaaagcgctccaaatatccacttgcaaattctacaaaaagagggtttcaaaactgctcaatcaaaaagcaagtttcaactctgtgagatgaaagcacacattacaaagaagtttctgagaatccttctgtctactttttgtgtgaagatattaccttttccaccataggcataacagtgctccaaatatccctttacatatactacaaaaaaagtgtttccaaactgctcaaacaaaagaaacgttcaactctgtgagttgaatgcacacatcacaatgaagtttctgagaatgtttctgtctagtttttatgtgaagatatttccatttccatgataggcctcaaagtgctccaaatatccacttatagattctacaaaaagagtggttccaaactgctgtatctaaagaaagattcaactctgtgagataaattcacacatcacaaagtagtttctcagaatgcttctgtcttgcttttatgtgaaaatagttccttttcaactataggcctcaaagcactccaaatatccacttgcagattctacaaaaagagtgtttcaaaactattcaatcaaaaaaaaggttcaactctgtcagttgaatggacacatcacaaagaagtttctcagaatgctactgtctactttttatgtgaagatatttctttttcaactataggcctcatagcactccaaatacccatttgcagatactacaaaaggagtgtttccaaactgctcaattaaaacacaggttgaactctgtgacttgaatgcacacatcagaaagaagtttctgagaatgcttctgtctgctttttatgtgaagatatttcattttgcaccatacgcctaaaatctctccaaatatccgattgcagattctacaaaagagtgtttcaaaactgctcaatcaaaagaaaggttcaacagtatcagacgaatgcacaaatcacaaagaagtttctgagaatgcttgtgtctagtttttatgtgaaggtatttccttttcaaccacatgcctcaaagcactacaaataccatttgaagatactattaaaagagtgtttccaaactactcaatccaaagaatcatttaattctgtgaaataaatgcatcatcacaaagaagtttctcagaatgcttcagtctagtttttatctgaggatatttccttttcagctttaggcctcaaagcactacaagtatccacttgcagatgctacagaaagggtgtttccaaacttctcaatcaaaagaaatgttcatctctgtgagttgaatgcacacatcacaaagaactttctgagaatgcttctgtctagtttttatgtgaagatatttccttttcactgtaggctcaaaatcgtccaaatatccatttgcaggtactacaaaaagactgtttccaaaatgctcaatcaaaagaaagtttcaaatctgtggcttgaatgcacatatcagaaagaagtttctgagaatatttctgtctagtttttatgtgaagatatttccttttccaccataggcctcaaagtgctccaaatatccacttgcagtttctacaaaaagtgtgttggaaaactgctcaatgaatagaaactttcaactctgtgagatcaatgcacacatcacaaagaagctattcagaatgctcttgtctattgtttaagtgaagatatttctttttgagatatagacctcaaattgatccaaatatccatttgcagattctacaaaaaaagtgtttccaaactgctcaatcaaaagaaaagttcatttctgtgagtaaaatgcacacatcacaaagaagtttctcagaatgctcctgtctaccttttaagtgaagatatttcttttcgagttatagacctcaaagtgatacaaatatccatttgcagattctacaaaaacagtgtttccaagctgctcaatcaaaagaaaggttcaattctgtgagtaaaatgtacacatcacaaagaagtttctgagaatgcttctgtctagtttttatgtgaagatatttccttttccaccatagacctcaaagcgcaccaaatatccacttgcagattctacaaaaagagtatttcgaaactactcaatgaaaaaaaaggttcaactctgtgagatgaattcataaatcacacagaaatttctcagaatgcttctgtctagtttttatgtgaagatattaccttttcagctataggcttcaaaaagtacaaaatatgtgtttgcggatactacaatacgagtgtttccaaactgctcaataaagcaaaggtccaactctgtgagttgaatgcacacatcactaagaagttgctgagaattcttctgtctagttttgatgtgaacatatttccttatccaccataggcctcaaagtgctcccaatatccacttgcagattctacaaagagagtgtttcaaaactgctcaacgaaaataaagtttcaactctgtgagatgaatgcacacaatacacagaacttcctcagcatgcttctgtctagtttttatgtggcgatatttgcttttcagctttaggcgtcaaagcgctccaaatatccacttgcagattctccaaaaacagtctttcaaaactgctcagtcaaaagaaaagttcaattctgtgagatgaatgcacacataacagagaagtttctcagaaagcttctgtctagtttttatgtgaagacatttccttttcaacaacaggcctcaaagcactccaaatatccatttgcagatactacaaaaagagtgttcccaaactgcttaatcaaaagaaaatttcaactctgtgaaatgaatgcacacatcaaaaagtagtttctgcaaatgcttctgtctagtttttatgtgaagatatttccttttccaccataagcctcaaagcgctccaaatatccacttgcagattccgcaaaaagagtgtttcaaaactgcttaatcaaacgacagattcaacttgtgagatgaatgcacacatcacaaataagtttctcagaatgcttctgtctagattttttgtgaagacatttccttttcaactataggcctcaaatggctaccaatatccatttgcagatacttcaaaaagagggtttctaagctgctcaatcaaaagaaagtttcaactgtgtgagttgaatgcataaatcacaaagaagtttctgagaatgcttctgtccagtatttatatgaagatatttgcttttctgccaatggcctcaaagcactccaaatatccacttgcagattccacaaaaagagtgcttcaaaactgctcaattaactgaaaggttcaattctgtgaattgaacgcacacatcacaaaggtgtttctgagaatgcttctgtctagtttttatgtgaagatatttccttttccaccatagtactcacagcgctccaaatatccagttggagatgctacaaaagattgtttcaaaactgcttaatcaaaagaaaggttcaactctgtgagatgaatgcacacatcagaaagaagtttctcacaatgcttttgtctagtttttatgccaagatatttccttttcagctgcaggcctcaaagcgctccaaatatccattgtcagatactaccaaaagagtgtttccaaactgctatatcaaaagaaaagtttaactctttgagttgaatgcacacatcacaaagaattttctgagaatgcgtctgtgtggtttttatgtgaagatatttccttttccactgcaaacctcaaagcactctcaatatccatttgctgattctacaaaaagagagtttcaaaactgctcaatcaaaagaaagattcaactctgtgagttgaatgcacacatcacaaagaagtttctcagaattcttcagtctactttttatgtgaaaatatttccttttcaactgtaggcttcaaagcgctccaaatatccatttgcagatactacaaaatgggtgtttccaaactcctcaatcaaaagaaatgttcaactctttgagatgaatacacgtatcacaaagaagtttctcagaatgcttctgtctagtttttatgtggagatatttccttttcagccgtaggcctgaaagcgttccaaatatccatttgcagacactacaaaaagagtgtttctaaactgttcagtcaagagaaaggtttaactctgtgagttgaatgcacacatcacaaagaagtttctgagagtgtttcctctagtttttatgtgaagatatttccttttccaatgtatgcctcaaagcactccaaatgtccacgtgcagaatccacaaaaagactgtttcaaaactgcttgatcagaaaaaaggttcaactccatgagatgaatgcacacatcacaaagaagtttctcagaatgcttctgtcttgtttttatatgaagatatttccttttcagctataggattcaaagtgctccaaatatccacttgcagatactaaaaaaagagtgtttcccaactgctcaataaaagaaaggttcaacactgtgagttgaatgcacacatcaaaacgaagtttctgagaatggttctgtcttgtttttatgtgaagatatttccttttccccctaggccaaaaagtgctccaaatatccacttgcagattctacaaaaagagtgtttcaaaactgctcaatcaaaagaagggttcaactctgtgagatgaatgcacacaacacaaataactttctcagaatgcttctgtctagttttatgtgaagatatttccttttcaactacaggcctgaaagcactgcaaatatccacttgcagatactacaaaaagagtgattccaaactgctcaatcaaaagaaagtttcaactctgtgagttgaatgcacacatcacaaagaagattctgagaatgcttctgtctggtttttctgtgaagatatttccttttaaaccatatgcctggaattgctccaaatatccaacttcagattctacaaaaagaatgtttcaaaactgctcaatgaaaagaaaggttgaacgctgtgagttcaatacacacatcaaaaaagtttctcaaaatgcttctgtctagtttttatgtgaagatatttccatttccaccattggcctcaaagcgcttcaagtgtcccattgcagattcttcaaaaagtgtgtttgaaaactgctcaatcaaaagacaagttcaaatccatgagatgaacgcacacatcacaaagaagtttctcagaatgcttctgtcttgtttttatatgaagatattttcttttcagctataggcttcaaagcgctccaaatatccaattgcagatactaaaaaaagagtgtttccaaactgctcaataaaagaaaggttcaacactgtgagttgaacgcatatatcacaaagaagtttcccagaatgtttctgtctagtttttatgtgaagatatttccttttccaccataaacctcaaagcactctcaatatccctttgacgattctacaaaaagagtgtttcaaaactgcttaataaaaagaaaggttcaactctgtgagatgaatgcacacatcacacagaagtttctcagcaggcttctgtctagtttttatgtgaagatatatccttttcaaccataggcctcaaagcactccaaatatccacttgcagattctacaaaaacagtgtttcaaaactgctcagtcaaaagaaatgttcaaaaatgtgagatgaatgcacacatcacaaaaaagtttctcagaatgcctctgtctactttttatgtgaagatacttccctttccactataggcctcgaattgccacaaatatcaactttgaaattctacaaaaagaatgtttcaaaaccgctctatcaaaagaaaggttcagtgctgtgagttgaatgcacacagcacaaagcagtttctcagaatgcttctgtctagtttttatgtgaagatatgtgcttttcctccatagtcctcaaaggctccaaatatccacttgtagattctacaaaagcagtgtttaaaaactggtcaattaaaagaaagtttcaactctgtcagatgaatgcacacatcacaaacaagtttttgagaatgctcctgtctattttttatatgaagatatttccttttccaccataggacctacagcactccaaatatccaattccagattctacaaaacagtgtttcagaactgcacaatcaaaagaaagttacagctctttgaggtgaatgcacacatcacaaagatgtttctcagaatgcttctgtccagtttttaagtgaagatttttccttttccactgtaggcagcaaagttctccaagtatccacttgtagattcgacaaaaagagtgtttcaaaagtgctcagtcaaaagaaatattcaacactgtgatgtgaatgcacacattgcaaagaagtttctcataatgcttctgtatagtttttatgggaagatatttccttttccaccataggcttcaaagcgctctaaatatccactggcaggcactacaaaaagagtgtttcaaaattgctcaattaaaagaaaggttgaaccctgtgagatgaatacacaaaccacaaagatgtttcccagaatgcttctgtgtagtttttatgtgaagatatttccttttccactataggccacaaagcattccaaatatccacttgcagatactacaaaaagtttgtttccaaactgctcaatcaaaagaaagtttcaactgtgtgacatgaatgcagacatcaaaaagaagtttctctgaatgctttgttctagtttttatgtgaagatatttccttttccactatagacctcaaagcactccaaatatccatttgcagatactccaaaaagactgtttccaaattgctcaattaaaagaaagtttcaactctatgagttgaatgcacacatctcaaagaagtttctcagaatgcttttgtctggtttttatgtgaagatattcccttttccactgtagacctcaaagccttccaattatcctcttgtagattttacaaaaagagtgtttcaaaactgctcaatcaaaagaaaggttcaactctgtgagatgaatgcacacattgcacagaagtttctcagaatgtttctgtctagtttttatgtgaagatatttccttttccaccacaggacccaaagcactacaaatattcacttgcagatactacaaaaggactgttccaaactgctcaatcaaaagaaaggttcagctctgtgaattgaatacacacagcacaaagaagtttctcagaatgtatctgtcaattttttatgtgaagatatacccttttccaccataggttcaaagcactccaaatacccactggcagatactacaaaaagattgtttcaaagctattccatcaaaagaaaagttcaactacgtgagaagaacacacacatcacaaagagttttctgagaatgcctctgtctggtgtttgtgagaagatatttccttttccaccatatgctgcaaagctattcatatatcccattgcagaaagtacaaaaagactgttttcaacctgctcaatcaatagaaaagttcaatcctgtgagttgaatacagaaatgcaaggaagtttctctgaatgcttctgtctagtttttatgtgaagatatttccatttccacgataggactcaaagcgctccaaatatccatttgcagataccacaaaaagacggtttccaaactgctcaatcaaaagaaatattcaactctgtgagatgaatgcacacatcacaaaggagtttctcagaatgcttctgtcaagtttttatgtgaagatatttccttttcaaccataggcgttaaaagtgttccaaatatccacttggagatactacaaaaagactgtttccaaactgctcaatcaaaagaaaagttcacatctctgagttgattacacacatcacaaagaagtttctcagtatgattctgtctagattttaagtgaagatatttccttttccaccataggcctgaaagcactccaaatatccacttgcagattctacaaaaagagtgtttccaaactgttcaataaacagaagggttcaactctgtgagatgaattcacacaacacatagaattttctcagaatgtttctggctagtttttatgtgaagatatttccattttcactataggactcaaagtgctccaaatatccatttgcagatactacaaaaagacagtttccaaactgctcaatcaaaagaaatattcaactctgtgagatgaatgcacacatcacaaaggagtttctctatatgcttctgtctagtttttatgtgaagacattttcttttccaatataggcttcaaagcgctctaaatatccgcttgcagattctacaaaaagagtgtttccaaactgtttaatcaaaagaaaggtccaactcagtgagatgaatgaacacaacacaaaaactttgtcagaatgcttctgtctagtttttacttgaagatatttcctttttcaccttaggcctcaatgtgttccgaatctccttctgcacatactaaaaaatactgtttccaaacttctcaatgaaaagaaaggttcaactcttttagatgaatgcacacatcacagcgaagtttctcagaatgcttctgtcttgtttttatgtgaagatatttccttttccacaatagcccacaaagcactccgaatatgaacttgcggattctgcaaaaaaagtgtttccaaacttatgaatcaaaagaaagtttcaactctgtgtaaggaatgcacacaacacaaagaaattagtcagaaaatttctgccaagtttttatgtgaagatattacctatttccccagaggcctcaatgggctcaaaaatattccttcagagattctacaaaacaactgtttccaaactgctcaatcaaaaaaaaagtttcaaccatgtgacatgaatgctctcatcgcaaggaactttctcagaatgcttctgtctagttttcatgtgaagatatttttttttcaccacaggcatcaaagcgctccaaatatcaatttgcagacacttcaaaagtactgtgtccatactgctcaatcaaaaggaaagtttagctctgtgagatgaatgaacacgtcacaaagaaatttctccaaatgcttccatccagtttttatgtaaagatattttcttttccactataccccacaaagcgctattaaaatacacctgcagtttctatcaaaaggctgtttccaaactgcacaatcaaatgaatggttcaactctgtgagatggattcacacatcacaaagacatttctcagaatgtttctgtctagtgtttatatgaagaaattcccttttccaccatgggcctcaaagcgctccaaatatccactttcagattgtacaaaaagagtgtttcaaaactcctcaatcaaaagaaaggttcaactctgtgagatgaatacacccatcacaaagaagtttctttgaatccctctgtctagtttttatgtgaagatatttccttttccactatgggcctcaaatcacaccaaatatcaatttgcagatactacaaaaagagtgtttacaaactgctcaatgaaaagaaaggtttaactgtgaaatgaatgcgcacattacaaagaagtttctcagaattcttctgtctagtttttatgtgaagatatttccttttccactataggccacagagcactctaaatacccactttcagattctacaaaaagagtgtttcaaaactgctcaatcaaaagaaaggctaaattctgtgacatgaatgcacacatcacaaagaggtttctgagaatgcttctgtctagtttttatgtgaagatatttccttttccactataggcctcaaagcactccaagtatccacttgcagatactacaagaagactgtttccaaactgctcaatgaaaagaatttttcaactctgtgagatgaaagcacacaacacacataagtttcccaaacgtttcactctagattttatctgaagagatttcctattttcccagaggcctcaatgggctcacacatatctctttccagaatctacaaaatgactctctccaaagtgctcaataaaaagaaagattcacctctgtggggtgaatgcacacatcacaaagacgtttctcagaatacttctgtctagtttttatgtgaagatatttcctatttcctgagaggtctcaatgggctcacaaatatcccattgcagattctacaaaacgactgctttcaaaatgctaaatcaaaagaaagttttaactctgtgagttgaatgcactcatcacaaagaagtttctcagaatgcttctttctagtttttatatgaagatattcccttttccacaaaaggtctcaattgagctccaaatatccacttgcagatactacaaaaagactgtttccaaactgctcaatcaaaacaaatgttcaactctgtgagatgaatgcgcacattacaaagaagtttctcagaatgtttctgtctagtttttatgtgaagatgtttcctttttcaccataggcctccaagcgttccaattatccacttgcagattccacaaaaagggtgttccaaaactgctcaatcaaaagaaagtttcaactctgagagatgaatgaacacatcacagagaaatttctgagaatgcttctgtctagtttctatgtgaagatatttatttttccacaataggcctcaaagctctccaaatatccacctgcagattctagaaaaagagtgtttcacaactgctcaatcaatagaaagtttcaactctgtgagatgcatgcacacatcacaaaagtttctcagaatgcttctctctagtttttatgtgaaggtatttccttttccatcatagtcctcaatgtgctccaaacatccactagcagattctacaaaaagaatgtttccaaacttttcaatcaaaagacaggttcaactctgtgagatgaatgtgcacatcacaagcaaggttctcagaatgcttctgtctcgtttttatgtgaagatattttcttttcctcagtaggccacaaagtgctccaaaaatacactagaagattccagagaaagagtgtttcaaaactgctcaatgaaacgaaatgttcaactctgtgagatgaatgcacacatcaccaagaagtttctcagaaagtttctgtctagtttttatgtgaagaagtttcctatttccccataggcttcaaaggactcacaaatttccctttgcagtttatagaaaacgaatgtttccacactggccaataaaaagaaatgtgcaactctgtcagatgaatgcacccatcacagagaagtttctcagaattcttctgtctagtttttatgtgaagatatttcatttttcaccagagttctcaaagagctccaaatatccatttgcagattctacaaaaggtctgtttccaaactacccaatcaaaggaaagtttcaactctgtgagatgaaagcacacatcagaaagaagtttccagaaagtttctgtctagttttcgtgtgacgatatttcctatttctccataggcctcaatggtctcacaaatatccctttggagattctacaaaaccactgtttccaaactgctcaatcaaaagaaatgttcaactctgtgaaatgaatgcacacatcacaaataagttgcagagaatgtttctatctagttttcatgtgaatatatttccttttccaccataggcttctaggtgccccaaatatccacttgcagattctacaaaaagagtgtttcaaaactgctcaatcaaaagaaaggttcaactgtgtgagctgaatgcacatatcacaaagaagtttctgagaatgcttctgtctagtttgtatgtgaagatatttccttttccatcttaggcctcaaagtgctccaaatatacattttcagattctacacaaagagtgtttcaaaactgctcaatcaaagaaacattcaactctgtgagatgaaagcagacatcacaaacaagtttctcagaatgcttctgtctactttttatgtgaagatatttccatttcaccataggcctcaaagcgctccaaatatccactggcatattctacaaaaagattgtttcaaaactgctcattcaaagaaaggttcaactctgtcagatgaatgcaaacatcacaaagaagtttctcggaatgtttctttctagtttttatgtgaagatgtttcctatttccccataggccacaatgggctcacaaatatccatttgcagattctacaaaatgcagttttccaaactgttcaatcaaaagaaatgttcccatctgtgagatgaacgcatacatcacaagtaagtttctcagaatgcttgtgtctagtttttatgtgaagatatttccatttgcaccataggcctcaaagtgcaccaaatatccatttgcagatactacaaaaagaccgttttataactgctcaatccaaagagaggttcaactctgtgagatgaatgcacacatcacaaagaagtttctcagaatgcttctgtctaatatttatgtgaaggtatttcctttatcaccataagccccaaggccctccacatatccctttgcagatcctacaaaaagactgattccaagctgctcaatcaaaagaaagtttcaactctgtgacatgaaagcaaacagcacaaagggttttctcagaaagcttctgtctggttttcatgtgaagatatttccaatttctccacaggcctctaagcgctccaaatatgcacttgcacattctgcaaaaagagtgtttcaaaactgctcaatcaaaagaaagtttcaactctgtgaggtgaatgcacacatcacaaagaagtttctcagaaggtttctgtctactttttatgtgaagatgtttcttatttccccttaggccacaattggatcacaaatatccctcggcagatattataaaaggaaggtttccaaactgctcaatcaaaagaaatgttcccatctgtgagatgaacccatacatcacaaataagtttctcagaatgcttgtgtctagttttactgtgaagatatttccatttgcaccataggcctcaaagcactccaaatatccatttgcagatactacaaaaaggctgttttccaactgctcaataaaaagagaggttcaactctgtgagatgagttcacacatcacaaagaagtttctcaaagtgctactgtctagcttttatatgaagatatttccttttttcaccataggccccaaagtgctccaaatatccatttgcagattctacaaaaatactgcttccaaactgctcaatcaaaagaaatcttcaactctgtgagattaatgcaaacaacacaaagaagtttctcagaatgcttctgtctagtttctatgtgaagctatatccttttccaccatagggcccaaagtgttccaaatatccaattgtagattctacaaagagaatgtttcaaaactgctcaatcaaaagaaagtttcaactctgggagatgaattcatacatcacaaagaagtttctcaggatgcttctgtccattttttagatgaagatatttcctttttcaccatagggctcaaagtgctacaaatatccatttgcagatacttaaaaagactgtttccaaactgctcaatctaaagaaaggttgaactctgttagatgaaagcacacatcacatagaagcttctcaggaactttctgtctagtttttatgtgaagatatttccaatttccccataggcttcaatgggctcccaataatccttttgcagattctacaaaacgactgtttcccaactgctgaatcaaaagaaaggttcaactctgtgagatgaatgcacacatcacaaagaagtctctcagaatgattttctctagtttttatgtgaatatacttcctttttcaccataggactcaaagtgctccaaatatccattcgtagtatctacaaaaagtctgtttccaaactgcactaacaaaacaaagtttcaattctgtgagatgaaaacacacatcacaaagtagtttctcagaatgcttctgtctagttttcatgtggagatatttcctactaccccataggcctcaataggctcacaaatatccctttacagactctacaaaacgactgtttaaaagctgctcaatcaaaaaaaatgttcaactctgtgagatgaatgcacacatcacaaataagtttctcaggatggttctctctactttttgtgtgaagatatttccttttccaacataggcctcaaagcactccaaagatcttcttgcagatttttcaataagagtgtttcaaaactgactttcttcacagaattggaaaaaaactactttaaagttcatatggaaccaaaaaagtgcccgcatcaccaagtcaatcctaggccaaaagaacaaagctggaggcatcacgctccctgacttcatactatactacaaggctacagtaaccaaaacagcatggtactggtaccaaaacagagatatagatcaatggaacaaaacagagccctcagaaataacgtcaaatatctacaactatctgatttttgacaaacctgagaaaaacaagcaatggggaaaggattccatatttaataaatggtgctgggaaaactggctaaccatatgtagaaagctgaaactgaatctcttccttacaccttatacaaaaattaattcaagatggattacagacttaaacgttagacctaaaaccataaaaaccctagcagaaaacctaggcattaccattcaggacataggcttgggcatggacttcatgtctaaaacaccaaaagcaatgacaacaaaagacaaaattgacaaatgggatctaattaaactaaagagcttctgcacagcataagaaactaccatcagactgaacaggcaacctacaaaatgggagaaaatttttgcaacctactcatctgacaaagggctaatatccagaatctacaatgaactccaacaaatttacaagaaaaaaacaaacaaccccatcaaaaagtgggcaaaggacatgaacagacacttctcaaaagaagacatttatgcagccaaaaaacacatgaaaaaatgctcaccatccctggccatcagagaagtccaaatcaaaaccacaatgggataccatctcaaaccagttagaatggcaatcattaaaaagtcaggaaacaacaggtgctggagaggatgtggagaaataggaacacttttacactgttggtgggactgtaaactagttcaaccattgtggaagtcagtgtggtgattcctcagggatctagaactagaaataccatttgacacaaccatcccattactgggtatatacccaaaggattataaatcatgctgctataaagacacatgcacacgtatgtttattgtggcactattcacagtggcaaagtcttggaaccagcccaaatgtccaacaagaatagactggattaagaaaatgtggcacatatacaccatggaatactatgcagccataaaaaatgatgagttcatgtcctttgtagagacatggatgaaattggaaatcatcattctcagtaaactatcacaaggacaaaaaaacaaacaccgcatattctcactcataggtgggaattgaacaatgagaacacatggacacaagaaggggaacatcacactctggggactgtggtgtggtggggggaggggggagagatagcattaggagatatacctaatgctaaatgaggagttaattggtgcagcacaccagcatggcacatgtatacatatgtgactaacctgcacattgcacgcatggagcttaaagcttaaaatataataataataaatttaaaaaaaataaataatagatttttttaatctgtaaaataaataaataaataaataaaaataaataaaaaattgctaaatcaaaagaaaggttcaactctgtgagatgaattcacacatcacaaagaagtttctcagaatgcttctgtctagtttttgtgtgaagatgtttcctttttcaccataggcctcaaagcactccaaatatccatcagcagatactacaaaaagactgtttccaaactgctgaatcaaaagaaaggttcaactacgtgagatgaatgcacacatcacaaagaagtttctcagaatgcttccgtctagtttttatgtgaagataattcctttttcaccatagggttcaaaacgctccaaatacccactggcagattctacaaaagagtgtttccaaactgctcaatcaaaagaaaggttcaattctgtgagatgaatgcacacatcacaaagaagtttctcagaatgcttctgcctagtttttatatgatgatatttccttcttcaccatatgccgcaacatgctcaaaatatccatttgcagattctacaaaaagactgtttccatactgctcaatcagaagaaagcttcaactctataagatgaaagcatgcatcacaaagaagtttctcagaatggttctctctagtttttatgtgaagatatttcctatttccccttaggcctcaatgggctcaaaaatatccctttgcagattctacaaaacagctgtttccaaactgctcaatcaaaagaaaggttcaactctgtgagatgaatgcacacatcacaaacgagtttctaggtatgtttctgtctagtttttatgtgaagatatttcctttttcaccataggcctcaaagcgatccaaatatccatttgcagattctataaaaagaccttttacaaactgctcaatcaaaagaaaatttcaactctgtgacatgaaagcacacatcatgaagaagtttctcagaaagattttgtctggtttttatgtgaagatgtttccatttccccatagtcctcaaagggctcacaaatatccctttgcagattctacaaaacagctgtttccaaactgctcaatcaaaagaaaggttcaactctgtgagatgaatgcacacatcacaaacgagtttctaggtatgtttctgtctagtttttatgtgaagatatttcctttttcaccataggcctcaaagcgatccaaatatccatttgcagattctataaaaagaccttttacaaactgctcaatcaaaagaaaatttcaactctgtgacatgaaagcacacatcatgaagaagtttctcagaaagattttgtctggtttttatgtgaagatgtttccatttccccatagtcctcaaagggctcacaaatatccctttgcagattctacaaaacagctgtttccaaactgctcaatcaaaagaaaggttcatctctgtgagatgaatgcacacatcacaaatgagtttctaggtatgtttctgtctagtttttatgtgaagatatttcctttttcaccataggcctcaaagcgatccaaatatccatttgcagattctataaaaagaccttttacaaactgctcaatcaaaagaaaatttcaactctgtgacatgaaagcacacatcatgaagaagtttctcagaaagattttgtctggtttttatgtgaagatgtttccatttccccatagtcctcaaagggctcacaaatatccctttgcagattctacaaaacgactgtttcaaaactgctcaatcaaaagaaatgttcaactctctgagatgaatgcacacatcacaaagcaatttctcagaatgcttctgtctattttgtatgtgaagatatttccttttccaccataggcctcaaagcactccaaatatctgcttgcagatactacaaaaagagtgtttccaaactgttcaatcaaaagaaaggttcaactctgtgagatgaatgcacacatccaaagaactttctcagagtgtttctgtctagtatttattttaagatatggcctttttcaccataggccacagagtgctctaaatatccatttgcagatcctacaaaaagactgtttccaaagtgctcaatcaaaagaaaatttccacttggtgagatgaaagcccgtatcacaaagtagtttttcagaaagtttctgtctagtttttatgtagaatctgcagagggatatttgtgagtggtttgaggcctgtggtgaaaaaggacatatcctcacataaaaactagacagaagcattttgagaaactttttcatggtgtgtgcattcatctaaccgagttgaacctttcttttgattgagcagattggaaagtctttttgtagaatctgcagagctacatatgtgagtcatttgaggcctatggtgaaaaaggaaataatttcacacaaaaactacacagaatctttctgagaaacttatttttgatgtgtgctttcatctcacagagttgaacctcttttttgactgagcagtttggaaacagtgtttttgcagaatctgcaaatggatatatggtgtgctttgaggcccatggtggaaaaggaaatatcttcaaataaaaaatagacagaaactttctgagaatctcctttgtgatctgtgctttcacatcactgagttgaaacattcttttcatggaggagttttgaaacagtctttttgaagaatctgcaaagggatatttgtgaccagtttgaggcctatggtgaaaaaggaaatatcttcacacaaaaactaggcagaagtttttgagaaacttctttgtgatgcttgcattgacctcacagagttgaacctttcttttcattgagcagtttggaaacagtctttttgaagaatgtgcagagggatacttgtttagccgttttaggcctatggtgaaaaaggaaatatcttcccagaaaaactagacaaaagatttttgagaaacttctttgtgacttgtgcattcatctcacagatttgaagctttctgttgattgagcagtttggaaagagtctttttgtagaatctgtaaagggatatttttgagaccattgaggcctatggtgaaataggaaacatctttacataaaaacaagacagaagctttctgagaaacttctttttgttgggtgctttcatctcacagagttgaacctttctttttattgagcagtttggatatagtctttttatagaatctgaaaatggatatttggagtgctttgaggcctatggtgaaaaaggaaatgtcttcacataaaaactagagagaaacattctgagaaacttctttgtgatgtgtgcttacatttcacagatttgaacctttcttttcattgagcagtttggaaataatctttttgtagaatctgcaaatggatatttgtgagcggtttgaggcataccgtgaaagaggaaatatcttcacataaaaactggagagtagcttttgagaaacttctgagtgatgtttgtattcatctcacagaattgaacttgtcttttcattgagcagtttggaaacagtctttctgtacaatctgcaaagggatgtttctgagagttttgaagcctatggtgaaaaagaactattttcatgtaaaaattagaccgaagatttcagagaaatttcattttgatgtgtgctttcatctcacagagttcagcatttcttttgattgagctgtttggaaagtctttttgtagaatctgcaaatggatatttggtgtgctttgacgcctatggtgaaaaaggaaatatcttcacataaaaactagacagaagatctctgagtaacttatttgtaatgtgtccattcatctcacagacttgaaactttcttttgattgagcagtttagaaaccgtctttttgtagattatgcagcagaatagttgtgagaggattgatgcctattgtgtaaaaggaaatatcttcacataaaaactagaaagaaactttctgagaaacttctttgtgatgtgtgcattcatctcagagggttgagcgtttcttttgattgagcactttggaaacagtctgtttctacaatctgcaaagggatatttctgagtggtttgaggcctatggtgaaaaagaagtatcctcatataaaaactagatagcagcattctcagaaactactatgtgatgtgtgcattcatctcacagtgttgaaaatttattttgattgagcagtttgcaaacagcttttttgtggactctgcaaagggatatttgttagcccattgaggactatggtgaaataggaaatatcttcacctaaaaactagacagaatctttttaagaaacttccttgtgatgagtgctttcatctcatcgaattgaacatttttttcattgagcagtttggaaacagtctttttgtagtatctgcaaagggatatttgtgagtggttgaggcctatggtgaaaaaggaaatatcttcacgtaaaaactagatagaagctttttgagaaacttctttgtgatgtttgcattcatctcacagaattgaacctgtcttttcatagagcagtttggaaacactctttttgtacaatctcaaatagatatttctgcacgtcttgaggcctatggtgaaaaagaaatatcttcacaaaaactagacagaaactttcagagaaacttcactgtgatgtgtgctttattatcacacagacgaacctttcttttgattgagcagtttggaaacagtctttttgaagtttatgcagagagatatttgtgagcagtttgatgtctatggtgtaaaaggaaatatcttcacataaaaattagacagaagttttctgataaacttctttgtgatgtgtgcattcatatcacagaggtgaacctttgttttgattgagcagtttggaaacaatctttttctacactctgcaaagggatatttctgagcaatttgaggcctatggtgaaaaagaagtattatcacataaaaactagaaagaagcattctgagaaacttttttgtgatgtgtgcattcatcgaacagagttgaaaatttcttttgattgagcagttttgaaacggtgtttttgtggaatctgcaaagggatatttgttagcccattcaggcctacagtgaaataggaaatattttcacataaaaacttgacagaaaatttctgagaaacttccttgtaatgtgtgatgtcatctaacatagttaaacctttcttttgattgatcactttggaaacagtctttttgtagaatctgcaaatggatatttggagtgctttgaggcctatagtgaaaacggaagcatattcacataaaaactagacagaagctttgtgagaaaattttctgtgatgggtgcattcacctcacagagttgaacgtttgttttgaatgagcagtttggaaacagtctgtttgtagaatcggcaaattgatatttttgagccatttgaggtatatggtgaaaaaggaaacaacttcacataaaaactagacagaagttttctgagaaacttctttgtgatgtgtgcattaatctcaccatgttcaacctttcttttgagtgagcagtttggaaacaatctttttatagactctgcaaaggtatatttgtgagcccattgaggcctatggtgtaacaggaaatatcttcacataaaaactagagagaagcattctgagaaaccactttgtgatgtgtcctttcatcacacagagttgaacctttccgttgattgagcagtttggaaacagtctttttgtagaatctgcaaatggatatttggagaactttgaggtctacggtgaaaagggaaacatcttcacaaaaaaactagacagaaactttctgagaaacttctttgtgatgtgtgctttcatctcacagggttgaaacattcatttcattgagcagtttggaaagtctttttgtagaatctgcaaagggatagttttgagctcaatgaggcctatggtgaaacaggaaataccttcacataaaaacaagacagaagctttctgagacacttctttgtgatgtgtgcttttatctcacagatttcaaactttattttgattgagaagtttggaaacagtatttttgtagaacctgcaagtgaatatttggagcacttcgaggcctatagtgaaaaaggaaatatcttcacataaaaaccagacagaacatttgtgagaaagttctttgtggtaggtgcattcatatcacgaagttgaacgtttcctttgattgagcactttggatatagtctgtttgtagagtctacaaagggatgtttgtgaatattttaaggcctgtgttgaaaaagtaaatatcttcacatataaactagacagaagaattctgagaaacttctttgtgatgtgtgcattcatctcacagagttgaacctttcttttgattcagcagtttagaaagagtttttttgtagaatctggaaatggatatttggttcactttgaggcctatggttaaaaaggaaatatcttcacataaaaactacacacaaactttctgagaaacttctttgtgatgtgtgcttcatctcactgggttgagcctgtcattttttttttattattatactttaagttctagggtacatgtgcacattgtgcaggtgagttacatatgtatacaagtgccactctggtgtgctgcacccactaactcgtcatctagcattaggtatatctctcaatgctatccctccccactcaccccaccccacaacagtccccagagtgtgatgttccccttcttgtgtccatgtgatctcatttttccattcccacctatgagtgagaatatgcggtttttgtttttttgtccttgcgatagtttactgagaatgatgatttccaatttcatccatgtccctacaaaggacatgaactcatcattttttatggctgcatagtattccatggtgtatatgtgccacattttgttaatccagtctatcattgttggacatttgggttggttccaagtctttgctattgtgaatagtgccgcaataaacatacgtgttcatgtgtctttatagcagcatgatttatagtcctttgggtatatacccaggaatggggtggctgggtcaaatggttattccagttctagatccctgaggaatcaccacactgacttccacaatggttgaactagtttacagtcccaccaacagtgtaaaagtgttcctatttctccacatcctctccagcacctgttgtttcctgactttttaatgactgccattctaaatggtgtgagatggtatcccattgtggttttgatttgcatttctctgatggccagtgatgatgagcattttttcatgtgttttttggctgcataaatatcttcttttgagaagtgtctgttcatgtccttcacccactttttgatggggttgtttgtttttttcttgtaaatttgttggagttcattgtagattctggatattagccctttgtccgatgagtaggttgcgaaaattttctcccattttgtaggttgcctgttcactctgatggtagtttcttatgctgtgcagaagctctttagtttaattagatcccatttgtcaattttgtcttttgttgtcattgcttttggtgttttagacatgaagtccttgcccatgcctatgtcctgaatggtaatgcctaggttttcttctagggtttttatggttttaggtctaacatttaagtctttaatccatcttgaattgatttttgtataaggtgtaaggaagggatccagtttcagctttctacatatggctagccagttttcccagcaccatttattaaatatggaatcctttccccattgcttgtttttctcaggtttgtcaaagatcagatagttgtagatatgttttgttatttgagaattttagacgaatatccttgatgaacattgatgcaataatcctcaataaaatactggcaaacccaatccagcagcacatcaaaaagcttattcaccttgatcaagtgggcttcatccctgggatgcaaggctggttcaatatacacaaatcaataaatgtaattcagcatataagcagagccaaagacaaaaaccacatgatcatctcaatagattcagaaaagacctttgacaaaattcaacaacgcttcatgccaaaaactctcaataaattaggtattgatgggacatatctcaaaataataagagctatctatgacaaacccacagccaatatcatactgaatgggcaaaaactggaagcattccctttgaaaattggcacaagacagggatgccctctctcaccactcctattcaacatagtgttggaagttctcgccaaggcaattaggcaggagaaggaaataaagggtattcaattaggaaaagaggaagtcaaattgtccccctgtttgcagatgacatgattgtatatctagaaaaccccattgtctcagcccaaaatctccttaagctgataagcaacttcagcaaagtctcacaatacaaaatcaatgtacaaaaatcacaagcattcttatacaccaacaacagacaaacagagagccaaatcatgagtgaactcccattcacaattgcttcaaagagaataaaatacctaggaatccaacttacaagggatgtgaaggacctcttcaaggagaactacaaaccactgctcaaggaaataaaagaggatacaaacaaatggaagtacattccatgctcatggttaggaagaatcaatatcgtgaaaatggccatactgcccaaggtaatttatagattcaatgccatccccatcaagctaccaatgactttcttcaaagaattggaaaaaactactttaaagttcatatggaaccaaaaaggagcccgcatcgcgaagtcaatcctgagccaaaagaacaaagctggaggcatcacactacctgacttcaaactatactacaaggctacagtaaccaaaacagcatggtactggtaccaaaacagagatatagatcaatggaacagaacagagcctgtcttttcgttgagcagtttggaaacagtctttttgaagaatctgcaaaggggtatttgtgagctctttgaagcctatgttggaaaaggaaatatcttcacataaaaactagacagaagctttttgagaaacttatttttgatgtttgcattcacctcacagagttgaaactttcttttctttgagcagtttgaaaatatcttgtgtgcaatctgccaacgcataacttggagtggtttgagcctatggtgtaaaagaaatatcttcacatgaaaactagacagaaccattcagagaaacttcactgtgatgagcattcatctgacagaattgaacctttcttttgattgggcagtttggaaacagtctttttcctgtatttgcaaagagatatttgtgaggcctttgaggcctaaggtgaaataggatatttcttcacataaaaactagacagaagatttctgataaacttctttgtgatgtgggcatttatcttgcagggttgaaactttcttttgattgagcagtttggaaacagtctttttgtagaatatgtagagggatatttgtgagtgctttgaggcctatggtgcaaatggaaatatctacacataaaaactagacaatagctttctaggaaacgtctttgtgatgtgtgcattcatctcacatagttgaaaatttcttttgattgagcagtttggaaacagtctttttgtagaatctccaaaggtatatttctgaattctatgatgcctacagtgaaaaaggaaatatcttcacataaaaactagacagaagcattctgagaaactctttcggatgtgtgcatttatctcacagtgttgaacctttcctttgattgagcagtttggaaaccgtatttttgtagtatctgcaaatggatatttggtgtgctttgaagcctatggttgaaaaggaaatatcttcacataaaaactaggcagaggcactctgaaaaaacttctttgtgatgtgtgcattcatagcaatgagttgaacctttctttttattcagcagtttagaaacagtcttttttgtaaaatctccaaagggtgatttgtgagtcctttgaggccaatggagaaaaaggaaatatattcacataaaaactcgacagaaggtttctgagaaactgcttgtgaagtgtgtattcatctcacaaagttgaacctttcttttgattgagcagtttggaaaccatctttgtgtagaatctgcaaagggatatttgtgagccctttgagacctatggtgaaaaaggaaatatcttcacataaaaactagatagaagctttctgagaaacttctttgtgatatgtgctttcaccttacagaggcgaaaatttcttttgattgagcactttggaaacagtcttttagtagaatctgcaaagggatatttgtgagccctttgaggcctatggtggaaaaggaattatctttacataataactagacagaaggtttatgataacctgatttgtgatgtgtgcattcatctcaaggggtaaacgtttcttttctttgagcagattggaaactctgctcttgcagaatcttcaaagggatatttgtgagcccttttattcctatggtgaaaaagtagatagctttacataaaaactagacagaaactttctgagaaacttctttgtgatgtgtgcattcatctcacagacttgaagctacttttgagtgagcagtttggaaactgtcttttcatagtaactgcaaaggtatgtttgtgagatctttgaggcctatggagaaaaaggaaatatcttcacataaaactagacagaaagtttgtgagaaactgctttctgatgtgtgcattcatctcacagagttgaataattcctttgattgagcagtttggaagcaatcttttcgtagaatctacaaaaggatatttgtgagccctttgaggcctgtggtgataatggaaatattttcacataaaaactagacagcatctgagaaacaaatttgtgatgtgtgcattcatctcacactgttgaaactttcttctgattgtgtagtttggaatcatactttatgtagaatctgcaaagggatatttgtgatccctttgaggcctatggggaaataggaactatcttcacataaaaactagacagaaggtttaggagaaactggtttgtgatgtgtgcattcatctcacagttttaaactctttctttctttgagcagattggaatctctgttcttatagaatctgcaaagggaaattggtgagtgctttgaggccagtagtgaaaaaggaaatatcttcacataaaaactagacagaagctttctgagaaacttctttgtgatatgtgcattcatgtcacagaattgaacgtattttgattgagcagtttggaaacactctttttgaagaatctgcaaggggatgtttgtgagcggtttgagatctatgatgaaaaaggaaatacctttacctaaaaactagacagaaaccttctgagaaacttctttctgatgtgtgcattcatctcatggaggtaaacgtttcttttcattgagcagattgcaaaccctgttcttgtagaatctgcaaaggtgtgtttgtgagacctttgaagcctgtggtgtaaaaggaaatatcttcatataaaaagtagacagatgctttctgagaaacttccctgtgatgtgtgctctcatctcacagagttgaacctttcttttaattgagcagattgtaaaaagtgtttttgtagaatcttcaaagggctatctgtaacgctttgtggcctatggtgaaaaaggaagtatattcacataaaaacaggacagaagcattctgagaagcttctttgtgatatgggcattcatctcgtatagttgaacctttcttttgattgagcagtttagaaagtctttttgtagaatctgcaaagggatatttatgagtggtttgaggcctatggtgaaaaaggaaatatctacacatcaaaactagagaggagttttctgagaaactgcgtagtgatgtgtgccttcatctcacagaggtaaatggtactttttattgagcagattggaaaccctgtacttgtataatctgcaaagtgatatttgtgagtgctttgaggtatatagcagaaaaggaaatattttcacataaaaagtactcagatgttttctgagaaacttccttgtgatgtatgcattcatctcacagagttgaacctttgttttgattaaggtgattggaaaaagtatttttgtaaaatctgccaatgtatatatgtgagcactttgtggcctatgttgaaaaaggaaatatcttcacataaaaactggagagaaggtttatgagaaactgctttgtgatgtatgcattcatctaatagcattgaattttctttttattgagcattttgagaaaagtctttggttagaatctgccaagggatatttgttagcactttgagctgtacggtgaaaaagagaatatcttcacataagaactagacagaagccttctgagaaactgctttgtgatgtttgcattcatctcacaatattgaacctttcttttgattgagcagtttggaagctgtctttttgtagaatctgcaaagggaaatttgtgatcgcttagaagactatggtgaaaaaggaaatatcttcacataaaaactagacagaagctttctgagaaacttctctgtaatgtgtgcattcatagcacagagttgaaccttttgtttgattgagcagtttgtaaacagtctttttgttgaatctgcaaggggataatcagagtgctttgaggcctatggtgaaaaaggaaatatcttcacataaaaactacacagaatcattctgagaaacttctttgtgatgggtgcatttatctcccagagttaaacgtttcttttgattgagcagtttggaaacagtctttttgttgaatctgcaagggaatatttatagcgctctggggcctatggtgaaaaaggaagtaacctcacttaaaaactagacagaagctttctgagaaactgttttgtgatgtgtgcattcatctcacagagttgaaactttcttttcattgagcattttggaaacaatcttttgtagaatctgcaaagggatatttggtgcactttgaggactgtggtgagaaaggaaatatcttcatataaaaactagacagaagcattctgggaaacatctctgtgatgtgtctattcaactcagagagttgaaactttcttttgattgagcagtttggaaagagtctttctatagaatctgcaaggggatatttttgagtcctttgaggtctatggtgaaaaaggaaaaatcttcacttaaaaactaggcagaaggtttctgagagactgcttcatgatgtgtgcatccatctctcagaagtaaacttttctttccattgacaatattggatactctgttcctgtagaattcgcagagggatatttgtgactgctttgaggcctacggtggaaaaggaaatatcttcacagaaatactagacagaagctttctgagaaactactttgtgatgtgtgcattcgtctcacacagttgaaactttcctttgattgagcagtatggaaaaagcctccttgcagggtctacaaagggatatttgtgagcagtttaagaactatggtgaaaaaggaattatgttctcataaaaactggacagaagcttttggagaaacttctttgtaatgcgtgtattcatctcacagagttgaaactttattttgattgagcagtttggaaaccgtctttttgtagaatcagcaaatggatatttatgagggccttgaggtctcaggtaagaaaaggaaatatcttcacataaaaactagacagaaggttcctgagaaactgttttcagatgtgtgccttcatctcacagaggtaaatgtttcttttcattgagcagattggaaactctcttttttgagaatctgcaagggaatattagtgagtggtttgaggcctattgtgaaaaaggaaatattttcacataaaaattaggcagaagctttcagagaaacttctttgtgatgtgtgcattcatctcacagatttgaacctttcttttgattgagcagtttggaaacattctttttgtagaatctgcaaagggatatttgtgagcactttgaggcttttggtgcaaaaaaggaaatatcttcatatgaaaactagacagaatttttctgagaaactgctttgtgatgcgtgcattcatctcacagagttgaaactttcttttgattgaacagtttggaaacagtctttttgtagaatctgccaagggatatttgtgagcgctttgaggcctatggtgaaaaaggaaatatcttcacataaaaactatacagaagctttctggaaaacttctttttgatgtgtgtattcatctcatgaagttgaactgtcttttgattgatcagtttagaaacagtctttctgtagtatctgcaaagggatatttgtgagggccttgaggcccatattgagaaaggaaatatcctcatataaaaactagacagaaggtttctgagtaactgctttgtgatgtgtgcattcatctcacacaagtaaacatttcttttcattgagcagattggaaactctgttcttgtagaatctgcaaagggatatttgaggaagttttgatgcctggggtgaaaaaggaaatatcttcatatgaaaacgagacagaagctttcagagaaacttctttgtgatgtatgcattcgtctcacacagttgaaccttggttttgattgagcattttggaaacgtctttttgcagaatctgcaaagagatatttttgagggccttgaggtctatggtaaaaaaaggaaatatcttcacataaaaactaaacagaagttttctgagaaagtgctttgtgatgtgtgctttcatctccagaggtaaatgtttattttcattgagccagttggaaactctgatctttgagaatctgcaaggggatatttctgagtggtttgaggcctattgtgaaaaaggaaatattttcatataaaaactagaccgaagctttctgagaaacttctttgtgatgtgttcattcatctcacagagttgaacctttcttttgattgtacagtttggaaacagtctttttgtagaatctgcaaaagtgtatttgggaaccctttgaggcatatgttgaaaaaggaaatatcttcacataaaaactagacagaagctttcttagagactgctacattttgtgggcatgcatctcacagaggtagaaatttcttttcattgagctgattggaaaccttcctcatatagtatctgcaaagggatatttgtgaccgcttttaggccagtggtgaaaaaggaaatgtcttcacataaatctagacagacgcattctgagaaacttctttgagatgtgtgcattcatctcatggagttgaacctttcttttgattgagcagtttggaaacagtcagtttgtagaatctgtaaagtgatatttgtgagcagtttgaagcgtatggtgaaaaagaaaaaatcttcccataaaaactagataggagaattctgagaaactgctttgttatgtgtgcattcatctcaaagatttgaaccctccgtttggttgagcagtttggaaacagcatttttgtagagtatgcaaagggatatttgtgagtcattggagtcctgtggtgaaaaaggaaaatcttcatatgaaaacaagacaaaggctttctgaaaaactgcttgtgatgtgtccattcatctcacatagttgaaactttcttttgaatgactagtttggaaacagtcataactgtctttttgtagaatctgcaaagggatatttgtgagtgctttgatgcctgtggtgaaaaaggaaatatcttcacataaaaaaatagaagatttccgagaaacttctttgtgatgtgtgcattcatctcacagagttgaatctttcttttgattgagcagtttggaaacagtctttttgtagaatctccaaagggatatttttcaaccctttgaggtctatggtgaaaaaggaaatatcttcacataaaaaatagacagaatgtttctgagagactgtttcatgatgagggcattcatctcaaagaggtaattatttcttttcattgagcagattggaaactctcttcttgtataatctgcaaagggatatttttgactgctttgagacctgtggtgaaaaaggaaatatcttcacataaaaactagacagaagctttctgggaaatggctttctgatgtgtgcattcatctcactgagttgaaactttcttttgattgaggagtttggaagagtcttttcatagaatctgcatagggatatttgtgattggtttgaggcctacggtgaaaaaggaaatatcttcacataaaaactagacagaagctttctgagaaacttctttgtgatgcttggattcatctcatagaattgaaactttcttttgattgatcagtttggaaagactctttttgtagagtctgtaaagggatatttgtgagctgtttgagtcctgtggtgaaaaggaaaataacttcatatgaaaactaaatagaatctttctgagaaaatgctttgtgatgtgtgcattcatctcacagagttgaaactttcttttgattgagcagtttggaaacagtctttttatagaatctgcaaaggcatatttgtgagcagtttgaggcctatggtgaaaaaggaaatatcttcacataaaaactacacagaatccttctgagaaacttctttgtgatgtgtgcattcatctcaaagagttgaacctttcttttgattaagcagtttggaggcattcttcttgtagtatctccaaaggtatatttgtgagtgctttgaggcctatggtgaaaaaggaaatatcttcacataaaaactagacagaagctttatgagaaacttctttgtgatatgtgcattcatctcacagttgaaattttcttttgaatgaatagtttggaaagtgtctttttgtagaatgtgcaaagggatatttatgagccctttgaggcctatggcaaaaaaggaaatatcttcaaataaaaattagacagaatgtttctcagaaactgcttcatgacatgggcattcatttcacagaggtaaacgtttcttttcattgagtagattggaacctctcttcttctagagtctgcaaagggatgtttgtgagcactttgaggcctattgtgaaaaaggaaatattttcacatgaaaactagacagaagctttctgagaaactactttctgatgtgtacattcatctgaaatagttgaacatttcttttgattgagcagtttggaagcactctttttgtagaatctgcaaagagatatttttgagcactttcaggcctattatgaaaaaggaaatatcttcacataaaaactagacagaagctttctgagaaaattctctgtgatgtgtgaattcatctcacatagctgagactttcttttgattgtcaatttggcaaaagtgtttttgtagcatctgcaaacggatatttgtgggctgtttgaggcctatggtgaaaaaggaaatgtcttcacataagaactagacagaagatttctgagagactgcttcatgatgttggcattcatcccacaaaggtagacattacttttcattgggcagatttgaaaccctcttcttgtagaatccacaaagttagatttgggaccactttcagtctgtggtgaaaaactaaatatcttcaaataaaaaccagacagaagcttactgagaaactgatttgtgatgtgtgcattcatctcacacagttgaaactttcttttgattgagcagtttggaaacagtctttttgtagagtctgtaaagggatatctgtgagtggtttgaggcatatggttaaaaatgaaatatcttcacataaacctagacagaaattttgtgagaaactgctttgtgatgtgtgcattaatctcaaagagttgaaactttcttttgattgagcagtgtggaaacagccttttcatagaatttccaaggggatatttgtgagccctttgaagcctatggtgaaaaaggaaatatattcacatgaaaactagacagaaggtttctgggagactgctttgggatgtgggcaatcgtctcacagaggtaaacatttattttcactgagcagattggaaactctcttgtggtatctgccaagggatatttgtgaccactttgaggcctgtggtgaaaaaggaaatatcttcacataaaaactaggcagaagctttctgagaaacttctttgtgatgcccgcattcatctcacagagttgaaactttcttttgattgatcattttggaaacagtctttttgtagaatctgtaaaggaatatttgtgagtggtttgagtcctatggtgaaaaaggaaaaatcttcacttcaaaaaatagacagaagatttctgagaaacttctctgtgatgtatgcattcatcccacagaggttaatctttctttcaattaagcagtttggaaacagcctttttgtagcatctgcaaagggatatttgtgagccctttgaggcctatggtcaaaagggaaataacttcctatgaaaactagacagaatctttctgagaaactgctttgtgatgtgtgcattcatctcacagagttgaaacttttttttttggttgagcagtttggaaacattctttttgtagatctgcaaagtgttatgtttgagcagtttgaggccaatggtgataaaggaaatatcttcccatcaaaactagacagaagctttctgagaaacttctttgtgatgtctacattcatctcagagagttgaagctttcttttgattgagcatttatggaaaaagtatttttgtagaatctgtagagggatatttgtagcaacttgaggcctatggtgaaaaaggaaatctcttcacattaaaactagacagaaggtttctcagagactgcttcatgatgtgggcattcatctcacagaggtagatatttcttttcattgagcagattggaaaccctcttcatgaagtatccgcaaagggatatttgtgaacactttgtggcctatggtgaaaaaggtaatatcttcacataaaaactagacagaagcattctgagacacttctttgtaatgtgtgcattcaactcacagacttgaacgtttcttttgattgagcagcttggaaacagtctttttgtagaatctgtaaagggatatttggagcaatttcaggcctatggtgaaaaaggaaatatcttcacacaaaaagtagacagaatggttctgacagactgcttagtgatgagggcattcatctcaaagaggtaaagatttcttttcattgaacatattggaaactctcttcttgtagaatctgcaatgggatatttgtgactgctttgaatcctgtggtgaaaaaggaaatatcttcacataaaaactagacagacgcattcttggaaactgctttctgatgtgtacattcatctcacagatttgaacctttctttcgatggagcagtttggaagagtcttcttgtagaatctacatagggatatttgtgagcaatttgaggcctgtggtgagaaaggaaatatcttcacataaaaactagacagaagttttcagagaaacttcattgtgatgtgtgcactaatctgacagagatgaacctttcttttgattgagcagtttggaaagaatctttttctagagcctgcaaagggatatttgtgagcactttgaagcctgtggtggaaaaggaaatatcttcacataaaaattcgacagaagctttctgagaaacttctttgttatgtgtgcattcatttcacagaggtaagcattccttttccttgggaagatttgaagctcttttcttttagaatcgaaggggatatttgtgagcgctttgagacctacagtgaaaaaggaaatatcttcacataaaaactacatagaatctttctgagaaacttctttgtgatgtgtgcattcatctcacagatttgaaccttccttttgattgagcagtttggagactgtcataacagtctttttgtagaatctgcaaggggatatttgtgagtggtttgaggtctagggtgaaaaaggaaatatcttcacatgaaaactagatagaaggtttctgagaaatttctttgtgatgtgtgcatttttctcaaagtgttgaaccattcttttgattgagcagtttggaaaaagtctttttgtagcatctgcaaagggacatttgtgagcactttgaggtctgtggtgaaaaaggaaatatattcccataaaaactagacagaagatttctgagaaacttcattgtgatgcctgcattcatctcacagagttgaaactttcttttgattaatcagtttggaaacagtcattttgcagaagctgtaaagggatatttgtgagtggtttgagtcctatggtgaaaaaggaaaaatcttcacataaaaaccagacagaagatttctgagaaacttctttgtgatgtggcatttatcccacagagtgaacctttctttcagttaagcagtttggaaacagcctttttgttggatctgcaaagggatatttgtgagccctttgaggccattgctgaaaagggaaataacttcataggaaaactagacagaatctttctgagaaactgctttgtgatgtgtgcattcatctgacagagtggaaactttcttttgattgggcagtttggaaacattatttttgtagaatctgcaaagtgttatttgtgaacggttttaggcctacggtgaaaaaggaaatatcttcatataaaaactaggcagaagctttctgcaaaacttttttgtggtatgtgcattcatctcacagagttgaaactttcttttgattgaatagtttggaaagcgtctttttgtagaatctgcaaagggatatttgtgattgctttgaggcctatggtgaataaggaaatatcttcatataaaaactagacagaaggttactgagaagctggttcatgatgtgggcattcatctcacagaagtaaacgtttcttttcattgagcagataggaaactctgatcttgtagtatctgcaaagggagatttgtgaggactttgaggcatatgatgaaaaagaaaatatcgtcacataaaaattaggcagtagcttcatgagaaacttctttgtgatgtgtgcatttatcacacagagttgaacctctctttgcattgagcagtttgcaaaagtacttttgtagaatctgcaaagggatatctttgagcgctttgaggcttatggtgaaaaaggaaataacttcacataaaaacgagacagaagatttctgagaaacttctttgtattgtgtgcagccatctcacagtgtttaacttctgttttcatggagcagtttggaaacagtatttttgtagaatctgcaaagggatatttctgagcgctttgagtcctatggtgaaaaaggaaatatcttcacgtggaaactagacagaagttttctgagaaacttctttgtgatgtgtgcactcatctcacggagttgaacctttcttttgattgaatagtttggaaatagtcctattgtcgaatgtacaaagggatatttgtgagcgcttggagggctgtgggaaaaaaaggaaatatcttcatataaaaactagaaagaagctttttgtgaaactattttgtgatttgtgcattcatgttacagagctgaatatttcccttgatggagcagcttggaaacagtcttcggatactctgtatggggatatttgtctgccctttgaggcctgttttgaaaaagtatatatcttcacatgaaaactcgataaaagatttctgaaaaactgatttgtgatgtgtgcattcatctcacagagttgaacctttctttttattgagcagtttggaaacagtctttttgtggaatctgcaaaggcatatttgtgagcactttgaggcctagggtgaaaaaggaaatatcttcacatgaaaaccagacagaagctttctgagaaacttctttgtgatgtgtgcattcagctcacagtgttgaacttttcttttgattgagcagtttggaaaacatctttttgtagtatctgcatagggatatttgtgagtggtttgaggactatggtgaaaaaggaaatacctacacataaaaactagactggacctttcagagaaacttcttcatgctgtgttcattcatctcacagggttgaaactttcttttgattgagcattttggaaacagtctttttgtagaatctgcaaagggatatttgtgagccctttgtggtctatgcagaaaaagaatatatcttcacatgaaaactagatagaaggtttctgagaaatttctttgtgatgtgtgcatttttctcagagttgaaccattattttgattgagcagtttagaaaaagtctttttgtagcatctgcaaagggatgtttgtgagcactttgaggtctatgttgaaaaaggaaatatcttcacataaaaactagacataatatttctgagagactgcttaatgatgtgggcattcatctcatagaggtagacattacttctcattgagcagattggaaaccctcttcttgtagaatccacagagggagatttgtgaccgccctcaggcctgtggtgaaaaaggtaatatcttcacataaaaactagatagtagcattctgagacacttctttgtgatgtgtgcattcatctcacagagttgaacctttcttttggttgagcagtttggaaacagtctttttgtagaatctgtaaagggatatttttgagcggtttgaggcctatggtgaaaaatgaaatatcttcacataaaaaccatacagaagttttctgaggaactgctttgtgatgtgcattaatctcacagagttgaacatttcttttgattaagtagtttggaaacagtgtttctgtagaatctgcaaagggatatttgtgagtggtaggaggcctaaggtgaaaaaggaaatatcttcacataaaaactagagagaagctttctgagaaacttctttgtgatgtgtgcattcatctcacataattgaaccttttttttgattgagcagattggaaacagtcatagcagtctttttgtagaatctgcaaagggatatttgtgatcgctttgaggcctatggtggaaaaggaaatatattcatgtagaaactacccagaatctttctgagaaactactttttgatgtgtgcattcatctcacagagttgaacctttgtttttattgagaagtttggaaattgtcattaccatcttttggtagaatctgaaaagggatatttttgagcggtttgagtcctgtgtgaaaagggaaataacttcatataaaaactagacagaagctttctgagaaacttctttgtgatgtgtgcattcatctcaaagggttaaacctttcttttgattaagcagtttggagacattctttttgtagtatctccaaaggtgtatttttgagtgctttgaggcctatggtgaaaaaggaaatatcttcacatgaaaactaaatggaagctttctgagaaacttctttgtgatatgtgcattcatctcacagatttgaaactttcttttgattgaatagttcagaaagtgtctttttgtagaatctgcaaagggatatttttgagccctttgacgtctatggcaaaaaaggaaatatcttcacataaaaattagacaaaatatttctcagaaactgcttcatgacataggcattcatctcacagaggtaaacgtttcttttcattgagcagattggaaactctcttcttctggattctgcaaagagatatttgcgagtgctctaaggcctatggtgaaaaaggaaatatcttcacatgaaaactagacagaagctttctgagaaactactttgtgatgtgtacattcatctcaaatagttaaagctttcttttgattgagcagtttggaaacactctttttatagaatctgcaaaggtatatttgtgagcactttgaagcctattatgaaagaggaaatatcttcaaatgaaaactaggcagaagctttctgagaaccttctttgtgatgtgtgaattcatctcacatagttgaatttttcttttgattgagcaatttcgaaaaagtgtttttgtagcatctgcaaatggatatttgtgagccctttgaggccgatggtgaaaaaggaaatatctaaacataagaactaggcagaaggtttctgagagactgcttcttgatgtgggcattcatgtcacagaggtagacattacttttcattgagcagattggaaaccctcttcttgtagaatccgcaaagttagatttgggactgctttcaggcctgtggcgaaaaaggaaatatcatcacataaaaaccagacagaagctttcacaaaaacttctttgtgatgtatgcattaatctcaaagtgttgaaacttcctattgattgagcactgtggaaacagttattttgtagaatctgcaaagggatatttgtgagctctttgaggcctatggtgaaaaaggaaatatcttcacttgaaaactagacagaagatgtctaagagactgcttcgtgatgtgggcattcatctcacagaggtaaacatttcttttcaactctcttcttgtagtatccacaaagggatatttgtgaccgttctgaggcctgttttgaaaaaggatatatcttcacataaaaactaggcaggaggtttctaagagactgctttttgatgcgtgcatccacctcacacaggtaaatgtctcttatcattgagtagattggaaactcttttcttacagaatctgcaaagggatatttttgagcacttggaggcctatggtgaaaaagtaaatatcttcacataaaaactacaaagaatctttctgagaaacttccttgtgatgtgtgcattcagctcacagagttgaacctttcttttgattgagcagattggaaacagtcataacagtccttgtagaatctgcaaaggaatagttgtgagcgctttgaggcctatggtgaaatagaaaatatcttcacataaaaactagacagaagattcctgaaaaactcctttgagctgtgtgcatttatcccacagagttgaacctttctttccgttgagcagtttggaaacagtctttttgtagaatctgcaaggggatatttgtgagcgcttgagacctatggtgaaaaagacctatcttcacataaaaaccagaaagaaggattctgagagactgcttcctgatgtgagcattcgtctcacagaggtaaacatttcttttcactgagcagattggaaactctcttcttgtagtatccacaaagggatatttgtgaccactttgaggcctgtggtgaaaagggaaatatattcccataaaaactagacagaagatttctgagaaacttcattgtgatgcctgcattcatctcacagagttgaaactttcttttgattaatcagtttggaaacagtctttttgcagaagctgtaaagggatatttgtgagtggtttgagtcctatggtgaaaaaggaaaaatcttcacataaaaaccagacagaagatttctgagaaacttctttgtgatgtggcatttatcccacagaggtgaacttttctttcaattaagcagtttggaaacagcctttttgttggatctgcaaagggatatttgtgagccctttgaggccattgctgaaaagggaaataacttcataggaaaactagacagaatctttctgagaaactgctttgtgatgtgtgcattcatctgacagagtggaaactttcttttggttgagcagtttggaaacattatttttgtagaatctgcaaagggatatttgtgtgtggtttgatgcctatggtgaaaaataaaatatcttcacataaaaactagaaaggagctttctgagaaacttctttgtgacgtgcgcattcatctcacagagttgaaactttctatggattgagcagtttgaaaacagtctttgtgtagaatctacaaagcgatatttgtgagcttgttgagacctatggtgaaaaaggaaatatcttcatataaaaaccagacagaagctttctgagatacttccttgagatgtgtgcattcatctcactaaatagaaccttgagtagtttgtaaacagtctttttgtagaatctgcaatccgatatttgtgagcccttggtggcctatggtgaaaaaggatatacattcacataaaaactaggcagaaggcttctgagaatctgatttgtgatgtgtgcattcatctgacagaggtaaatgtttcttttcattgatcagatgggaaactctcttcttgtagaatctgcaatgagatacttgtgagtgctttgaagcctatggtgaaaaagtaaatatcttcacataaaaagtagacaaaagctttttgagaaacttctttgtgatatgtgctttcatctcacacagttcaaactttcttttgattgagcagtttggaaaaaatctttttgtagaaaatgcaaagggatatttgtgagtggcttgaggcctatggatggaaaggaaatatcttcacataaatactagacagaagctttctgagaaacttctttgtgatgtgcacattcatctcacagacgtaaacctttcttttcattgtggagattgtaaactctgttcttgcagtatctggaaagggatatttctgagcgctttgaggcctgtggtgaaaaaggaaatatcttcacataaaaagtagacagaagctttctgagaaacttctttgtgaaatgtgcatacatctcacagagttgagcctttcctttgactgagcagtttggaaacagtctttttgtagaatcttcaaagggatatttgcgaacactttgaggtctatagtgaaaaaggaaatatcttcacataaaaactagagagaagtatactgagaaactgctttgaaatctgtgcattcatctcacagaggttaacctttctttacattgagcagattggatattatgttcttatagaatctgaaaaggcatatttttgagtgctttgagtcgtatggttaaaaaggaaatatcttcacataaaaactagacagaaactttctgagaaacttctttgtgatatgtgcactcatctcacagagttgaacctttctgagtagtttgaaaatagtcttattgtcgaatctgcaaagggatacttctgagtgcttggagggctgtggtgaaaaaggaaatatcttcatataaaagctagaaagaagttttctgtaaaacttttttgtgatttgtgcattcatctcacagaggtgaacaattcccttgagggaaaagtttggaagcagtctttttggagaatctgcatagggatatttgtctgccctttgaggtctgttttgaaaaagtatatatcttcacatgaaacctcgacaaaagctttctgaaaaactgctttgcgatgtgtgcattcatctcacagagttgaacttttctttttattgactagtttggaaacagttttttttcgtggaatctgcaaagggatatttgtgagtactttgaggcctagggtgaaaaaggaaatatcttcacatgaaaaccagacagaaactttctgagaaacttcttctttttatagaatctgcatatggatatttgtgagcagtttgaagactatggtgaaaaaggaaatatctacacataaaagctagacagaacctttcagagaaacttctttgtgatgtgtgcattcatctcacagagttttgtctttcttttgagtaagcagtttggaaacagtccttttgtagaaactgcaaagggatatttttgtgtgctctgaggcatatggtgaaaaaggaaatatcttcacataaaaactagacagaagctttctgagaaactttcttttgatgtgtgctttcatcttacagtgttgaaacttacatttgattgactagtttggaaacagtctttttgtagaatctgcaaagggatgtttgtgatccctttgaggcatatgatgaaaaaggaaatatcttcacataaaaacaagacagaagattcctgagaaactgcttagggacatgggcattcatttcatagaggtaaacgtttcttttcattgagcagataggaaactctgatcttgtcaaatctgcagagggatatttgtgagtgctttgaggcctatggtgaaaaaggaaatatctacagataaaaactggacagaagtttctgagaaacttctttgtgatgtgtgcattcaactcaaagggttcaacctttcttttgattgagctgtttgaaaacacactttttgtggaatctgcaaacagatatttgtgagcggtttggggcctatggtgaaaaaggaaatatcttcacataaaaactagacgaaagctttctcagaaacttctttgtgatgtgtgcattcatctcacagagatcaacatttcttcttgttgagcagtttggaaaaagtctttctgtggaatctgcaaagggatatttgtgagtgctttgaggcctgtggtgaaaaaggaaatatcttcagataaaaactggacagaagctttctgagaaacttctttgtgatttgtgcattcaactcaaagagttcaacctttcttttgattgagctgtttggaaacacgctttttgtggaatctgcaaacagatatttgtgagcggtttggggcctatggtgaaaaaggaaatatcttcacataaaaactagacgaaagctttctcagaaacttctttgtgatgtgtgcattcaactcaaagagttcaacctttcttttaattgagctgtttggaaacacgctttttgtggaatctgcaaacagatatttgtgagcggtttggggcctatggtgaaaaaggaaatagcttcacataaaaactagatgaaacctttctcagaaacttctttgtgatgtgtgcattcatctcacagagatgaacatttcttcttgttgagcagtttggaaaaagtctttctgtggaatctgcaaagggatgtttgtgatccctttgaggcatatgatgaaaaaggaaacatcttcacataaaaactagacagaaacattctgagaaatttctttgtgatgtgttcattgatcttacataaagttgaatctttatgtggattgagtagtttggaaacattctttttgtagaatctgcaaagggatgtttgtgactcctttgaggactatggtgaaaaagcaaatgtcttcccttcaaaactagacagaaggtttctgagaaactgctttttgatatgtgcacccatctcacagagataaaagtttcttttcattgagcagattggaaactctgttcttgtagaatccgcaaagggatatttgtgagcgctttaaggctatggtgaaaaagggaatgccttcacataaaaactagacagaatatttctgggaaacttcttgtgatgtgtgcattcatctctcagtgttgaactgtcttttgattgagcagtttggaaactgtctttttgtaaaatatgcaaagggatacttgtgagccctttgaggcctatggtgaaaaaggaagtatcttcacataaaaagtagacagggggtttatgagaaactgctttgtgatgtgtgcattcatttcacagtgttgaatctttcttttgattgagcagtttgggaacagtctttttgcagtatctccaaatggatatttgtgagccctttgatgcctatggttaaaaaggaaatatctttaataaaaactagacagaagctttgtgagaaacttctttgtgatgtgtgcattcatctcacagagttgaaaatttcttttcattgagcagtttcaaaacagtctttttgtagaatattcaaagggatattttagagtggtttgaagcccatgttgaaaaaggaaatatcatcacacaaaaaccagacagaaaatttctgagaaacttctttgtgatgtatactttcatctaacagagttgaacttttcttttgtttgagcagttgggaaactctctttttgtagaatctgcaaagggatatttctgagtgcttttaagcctatcgtgaaaaagaaaatatcttcatataaaaaatacagagatgttttctgagaaacttctttgtgatgtgtgcattcatctgacagagttgaaattttcctttgactgagcagtttggaaaccatctttttgtggaaagttccatgggatatttggagcgctttgaggcctatggtgaaaaaggaaatatcttcacataaaaactggacagaagatttctgagaaacttctttgtgatatgtgcattcatctcacagtgttgaaactttcctttgatttagcagtgtggaaacagtctttttgtaaaatctgcaaagggatatttgtgagctgttagaggcctatggtggaaaaggaaatatcttcatataaatactagacagaagctttctgagaaactaatttgtgatgtgtgctttcatctcacagagttgaatctttcttttgattaagctggctggaaacagtctttttgtagaatttgcaaagggatatttggggtgctttgagacctatgttgaaaaaggaaatatcttaatataaaaagtagacagaagctttctgagaaacatcattgtgatgtgtgccttcaactcacagagttgaacctttcttttgattgatcagtttggaaactgtcttttgtagaatctacaaagggatatttggagctctttgagacctatggttaaaaaggacatatcttcccataaaaactagatagaagctttctgagaaacttccttatgatgtgtgcgttcatctcacagagttcaacgtttcttttgattgagcagtatggaaacattctttttgtagaatctgcaaaggaataggtgtgagtggtttcaagcctatggtgaaaaaggagataccttcacataaaaactagacagaagcttcctgagaaacttctttgtgatatgtgcattcatctcactgagttgaaactttcttttgattgagcagtttggtaatagtttcttgtagaatctgcaaagggatatttgtgagttcttggtcacctatggtagaaagggatatatctttacataaaaagtagagagaagttttctgagaaactgacttgttacatgtgcattcatcccacagaagtaaacgtttcttttcattgatctgattggaaattctgttcttctggaatctgcaaagggatatttattagccctttgaggcctatagtgaaaaaggaaataccttcatataaaaactagacagaagcattctgggagacttctttctgatgtgtgcattcatctcacagagttgaacctgtcctttgattgagcagtttggaaacagtctttttataggatctgcaaatggatatttggagcactttgaggcttattgtgaaaaaggaaatatcttcacataaaacctagacagaaactttctgagaaactactttatgatgtgtgctttcatctcacacagttgaacctttcttttcatttagcagtttggaagcagtctttttctagtatctacaaggggatatttgtgagcataaggcctatggagaaaaaggaagtatctgcacttaaaaactagacagaagcttcttagaaacttctttgtgatgtgtggattcatctcacagatttgaaagttccctttgattgaacagtttagaaaaggtctttttgtagtatctgcaaaggtatatttgtgagcagtttcaggcctatggtgaaaaaggaaataccttcacataaaaactagacagaagttttctgagaaacttctttgtgatatgtgcattcatctcactgagttgaaaatttcttttcattgagcactttggtaacagttttttgtagaatctgccaactgatatttgtgagcccttggtcacctatggtgaaaaaggatatatgtttacataaaaagtagagagaagttttctgagaaactgatttgtgatgtgtgcattcatctcacagattttaacctttcttttgattgagcagtttggaaactcttttggtaggatctgcaaagggatatttgtgagcagtttgatgcctatggtgaaaaaggaaatatcttcacataaaaactagacagaaactttctaggaaacttctttgtgatttgtacattcatctcacagagttaaaactttctatttattgagcactttgaaaacagtctgtgtgtagaatctacaatgggatatttgtgagtgctttgagacgtattttgaaaaaggaaatatcttcatatagaaactagacggaagctttctgagaaacatatttgttatgtgtgctttcatcccactgagatgaaccattcttttgattgagcattttggaaacagtctttttgtagaatatgcaaagggatatttgtgagcctttggtgacctatggtgaaataggatatatcttcacataaaaactggacagaaggcttctgagaatatgatttgtgatgtgtgcattcatctcacagaggtaagcatttctcttcattgatcagattggaaactctcttcttgcagaaactgcaaagggatatttgtgagcactttgagtcctatggtgaaaaaggaaacatgtttgcattaaaacaagataaaagcattgggagaaacttctttgtgacatgtacattcatctcatggatatgaacctttattttgattcagcagtttggaagaagactttttgtagaatgttcaaagggatatttgtgagcagtttgaggcctacggtggaaaaggaaatatcttcatataaaaactagacagaagctttctgagaaactcctttgtgatgtgtgcactcaactcacaggtgtaaacgtttcttttcattgagcagattggaatctctgttcttgtggaaactgccaggggatatttggagtgcattgaggcctatggtgaacaatgaaatatcttaacataaaaagtagacagaagctctttgagaaacttctatgtgatgtgtggattcatctcacagagtggaaactttcttatgattgagcagtttggaaacagtcttttcgtagaatctgccaagggatattttgatcgctttttggtctattttgaaaaaggaaatatcttcacataaaaattagacagtacctttttgagaaacttctttgtgatgtgtgcattcatctcacacagttgaacacttcttgtgattgagcagtttggaaacagtctttttgtggaatctgcaaagggatatttggacagctttgaggacaatggtggaaaaggaaatatcttaacatacaaactagacagaagctttctgagaaatttccttgtgatgtgtgccttcatctcacagagttgaaaacttcttctgattgagcagtttggaaacagtctttttgaagaaacttccaaaggatatttggagggctttgaggcatatggtgaaaaaggaaatatcttatcataaacactagacagaagttttctgagaaacttctctgtgatgtttgcattcatcttacagagttgaaactttcttctgatagagcagttttcaaacagtctttttgtagaaactgcaaagggatatttgtgagatgtttgagacctatttggaaaaggtaatatcttaacataaaacctagacagaagatttctgagaaacttctttgtgacatgtgctttcatctcacagaattgaacctgtcttttgattgagcagtttggaaacagtctttgtgtagaatcagcaaatggatatttggagcactttcaggcatatggcgaaaaagggtatatgtccacatgaaaactagacagaagtttactgagaacttattcataatgtgtgcgttcatctcacagagttgaacatttcttttcattgagtagtttgaaaacaggtttttgtagtatctaaaaaagatatttggagttccttgaggcctatggtgaaaaaggaaatatcttaatataaaaactagacagaagctttctgagaaacttctttgtgatgtctgcattcatctcacagagatgaaacttactgttcattgagcagttaggaaacagtcctttcgtataatctaccaaggtatatttgtgtgcagtttgagacctatggggaaaaaggaaatatcttcacataaaaagtagacagaagctttctgagaaactactttgtgatgtgtgctttcatctcacagagttgaatctttcttttgactgagcattttgaaacagcctttttgtagaatctgcaattggatatttagagcgattagagacctaaggtgaaaaaggaaatatcttaacataatcactagaaagaaactttctgagaaacttctttgtgatgtctgctttcatctcaaacagttgaacctttcttttcattcagcagtttggaaacagtctttttgtagagtctacaaaggtatatttgtgagctgtttgaggcctatggtgaaaaaggaaatatatttatataaaatctacacagaagattttgagaaatttctttgtgatctttgtattcatctcacagagctgaacctttcttttgattgagcagtttggaaacagtctttttgtagaagttgcaaatggatatttggagtgctttgaggcctataatgaataatggatatcttcatataaaaactggacagaagatttctgaaaaacttccttgtgatgtgtgcattcatctcacagagttgaaactttcttttcattgagcagtttggaaagagtctttttgaagaatctaccacgggatatttggagggctttgaggaatatggtgaaaaagggaacatcttaaaataagaactagacagaagttttctgataaacatctttttgatgtgtgcattcatctcacagagttgaaactttcttctgattgagcagttttgaaacagtccttttgtagaatctgcaaagggatatttttgagtggtttgaggcctatggtgaaaaaggaaatatcttaaaataaaacctagacagaagctttctgagaaacttctttgtgatgtgtgcattcatcaaacagagttgaaacttcttttcattgagcagtttggaaaaagtctttttgaagaatctaccaagggatacatggagctcttttagtcctatggtgaaaaaggaaatatcttaacataaaaactagatagaatttttctgagaaacttctttgtggtgtgtgcattcatcaaacagagttgaaagtttcttctcattgagcagtttggaaaaagtctttttgaagaatctaccaaagtatacatggagctcttttagtcctatggtgaaaaagaaaatatcttaacataaaaactagatagaatttttctgagaaatttctttgtgatgtgtgcattcatctcacagagttgaaactttcttctgattgagcagtttcaatacagtctttttgtagtatctgccaagggatatttgtgagtggtttgaggcctatttcaagaaaggaaataccttcacttaaaactagacggaaactttttgggaaactcctctgtgatgtgtgcattcatctcacaggttgaatctttctttgattgagtagtttggaaacagtctgtagaatctgcaaatggatatttggagtgctttgaggcctaaggtgaaaaaggaaatagcgtcacaaaaaaactagacagaagctctctgagcagcttctttgtgatgtgttcattcacctcactgtgttgaacctctcttttgattgagcagcttggaaacagtctttttgtaaaatctgcaaaggaatatttgtgggcagtttgaagcctatggcaaaaaagaaaatatcttaacataaaaagtagaaagaagcattctgagaaacttctttgtgatgtgtgcattcatctgacagagatgaatctttcttttgattgagcactttggaaacagtctttttgtagaatctgccaagggatatggggagtgcttagaggcatatggtgaaaaaggaattttcttcacataaaaactagacagaagcattctgagaaacctctttgtgatggatgcactcatctcacatagttgaacatttcttctcaatgagcagttttgaagtggtctttttgtattatctaaaaagggataattggagcactttgaggcctatgatgaaaaaggaaatatcttcacataaaaactagacacaagcttcttcagaaactactttttgatgtgtgcattcatctcacagagttgtacctttcttttgattgagcattttggtaactgtctttttgtagaatctgcaaagggatatttgtgagcgatttaaggcctatggtgaaaaaggaaatatcttcacataaaaactagacagaggctttctgagaaacttctttgtgatgtgtgcattcatctcacagagtggaacctttcttttgattgagtagtttggaaaaagtatttttgtagaatctgcaaatggaaatttggagcactgtgaggcaaaggtgaaaaaggaaatatcttcacataaaaactagacagaatctttatgagaaacttccttgtgatgtgggcattcatctcacagatttgaaccattcttttgattgagcagtttggacacagtcttttttagaatccgcaaaggaatatttctgagcagtttgaggcttatggtgacaaaggaaatatcttcacataaacactagacagaacctttttgatatacttctttgagatgcatcaattcatctcacagagttgaacatttcttttaattgagcagtttggaaacagtctttttgtggaaactgcaaagggatatttggagtactttgtggcctatggtggaaaagaaatatcttcacataaacgctagacagaagatttctgagaaacttctttgtgatgtttgcattcatctgacactgttacaccattcttttggatgatcagtttggaaacagtctttttgtataatctgcaaatggatacttgtagcactttgaggtctgtggtgtaaaaggaagtatcttcacgtaaaaactagaaggaagctttctgagaaacttatttgtgatgtgtgcattcatcgcacagtgttgaaagtttcttttgattgaacagtttggaaacaggctttttgtagaatatgccaagggatattaggagtgctttgaggcctatgttgaaagaggaattatcttcacataaaatctagacagaatcttctttgtgatgtgtgcattcataatacacagttgaacctctcttttcactgagcagtttggaaacagtctttttgtagaatctgcaaacgaatattcggagggctttgtatcctatggtgaaaaaggaaacatcttcacataaacactatacagaagctttttgagaaacatctttgtgatgtgtgcattcatctcacagcgttgaaactttcttttcattgaacagtttgcaaacagtctttttgtagaatctgcatagggatatttggagccatttgaggcctacagtgaataaggaaatatcttcacataaaaactacacagacacattctgagaaactttgtgatgtgtgtattcatgtcacattgttgaaaatttatttcaattaagtagtttggaaagagtctttttgtagaatcagcaaagggatatttgagacccatttgaggcctatagtgaaaaagaaaatatcttcacataaaaactagacagaagttttctgagaaatttctttgtgacgtgtgcattcatctctcagagttgaacctttcttttgattgagcagtttggaaaaagtcttttgcagaacctgcaaagggataattggagcgctttcaggcctatggggaaaaaggaaatatttccacataaaaactagacagaagctttcttagaaacttctttgtcatgtgtgcattcatctcacagagattaacatttcttttgatggagcagtttggtatcaggctttttgtagaatctgcaaatggatacttggagtgttttgaggcttatggtgaaaaaggaaatatcttcacataaagactagacagaagatttctgagaaacatctttccaatgtgtgcattcacatcagagatttgaaactttcttttgattgagcagttttgaaacaatatttttgtaggatatgcaaaggggtaattgtgaggggtttgaggcctatggtggaaaaggaaatatctacacataaaaactaggcagaagctttttgagatacgtctttgtgatgtgtgcactcatctcacagaattgaacctttcttttcattgagcagtttggaaacagtctttttgtggactctgcaaaggactatttggaccgcgttgtgcatatggtgaaaaaggaaatatcttcacataaacactacatagaagctttctgagaaacttttttgtgatgtgtgcattcatctcacagagttgaaactttcttttgattgagcagtttagaaactgtctatttatagaatcttcatagggatatttttgagccctttgaggcctatagtggaaaatgaattatcttcacataaaaatcagagagaaactttttgagaaacttgtatgtgatgtgtgcatttatctcacagagtcaaagagttcttttgattgagcagtgtggaaacagtctttttgtagaatctgcaaagggatatttgtgagcactttgaggcttatggtgaaaaagaaatatcttcacataagaactagaaagaaggcatccgagagactgctttctgatgtgtaaattcttctaacagaagcaaacatttcttttaactgaacagattggaaactcctttcttgtagaatatgcaaacggatatttttgagcacagggaggactatgatgaaaaaggaaatatcttcacataaaaattagaaagaagctctctgtgaaacttctttgtgatgtgtgcattctcacagagttgaatctttattttgattgagcagtttagaaacagtctctttatagaatctgcaaaggaatatttgtgagccctttgaggcctatggtgaaaaaggaaatatcatcacataaaaactacacagaaactttctgagaaactgcttcatgctgtgtgcattcatctcacatagttgaatctttcttttgattgagaagctttgacagactctttttgtggaatctgcaatgggatatttttgatggcttgagacatattttgagaaagaaatatcttcacattaaaactagaaagatggcttctgagaaacagctgtctggtgtctgcattcatctcacagaggtaaacgattattttcattgatcaaattgcaaactctgttcttgtagattcttcaaagggatatttgtaagcgctttgaggcctgtggtgctatggtgaaaaaggaaatatcttcacataaaaaccagacagaagatttctgagaaacttcattgtgatgtgtacattcatctctcagagttgaactttcttttcattgagcagtttggaaacagttttcatgtagaatctgcaaacggatatttctgtgcgctttgatgcctatgttgaaaaaggaaatatctttacgtaaaaagtagacagaagctctctgagaaacttatttgtgatgtgtgccttcatcaggcagagttgaaccattcttttgatagagcagtttggaaacagtctttttgtagaatctgtaaagggatatttgtgttcactttgaggccgatggtgaaaaataaaaatcttcacataaaaactagaaagatggtatctgagaaactactttctgatgtgtgaattcttctaacagaagtaaaagtttcttttcactgagcagattagaaactcttttcttgtagaatatgcaaacggatatttttgagcacagtaaggactatgttgaaaaaggaaatatcttcacataaaactagacagatgttttttgagaaacttcttttttatgggtgtattattctcacagagttgaacccttattttgattgagaagtttggaaacagtttttttgtagaatctgcaaaaggatatttgtgagtgcttggaggactatggtgaaaaaggaaatctcttcacataaaaactaaacagaagctttctgaaaaacgtctttgtgatttttgcattcatctcacagagttcaaactttgttttgattgagcagtttggaaatagtcttcttatagaatctgcatagggatattttcaagccctttgaggcctatggtggaaatatcttcacataaaaattagataaaaggtttctgagaaactgcttcatgatgtgtgcattcatctcacagaggtaaatgttacctttcattgagcagattggaaactctgctcttgtaaaatatgcataggaatattcgcaagtgctttgaggcctacggtaaaaaacgaaatatcttcacagaaaaactagaccgaagctttctgagaaacttccttgtgatgtgtgcattcatctcacagagataaaactttcttttcatagagcagtttggatgcagtccttttttagaatcttcatagggacattagtgagcggcttctggactgtggtgaaaaaggaaatatgttcacataaaaatagacagaattcttctgagaaactttttttgatgcatgcattcatctcacagagttgaaattttcttttgatttagcaggttggaaagagtctttttgtagtgtctgcaaagtgaaatttgtgagcattttgaggcctattgtaagaaaggcaatatcttcacataaatctagacagaaacattctaagaaactcctttgtgatgagtagattcatctgacacatgtgaaccttacttttgattgagttgttttgaaagagtctttttgtagaatatgcaaagggacaatttttagtgctttgaggcctgctttgtgatctgtgcattcatctcacagagttgaaatattattttttgagaggtttggaaacagactttttgtagaatctgcagatggatatttgtgagcagtttgagccctattgtcaaaaataaatatcttcacataaaaagtatgaagacagtttctgggacactgctttgtgatggttgcattcatctctcagaggtaaacgattcttatcattgagcagattggaaactctgttcttgtaaaatctgcaaagggatatttgtgagtgctttgaggcctatggtgaaaaaggaagtatcttcacataaaaactagaaagaagctttctgagaaacttcttcatgatgtgtgaattcatctcacagagttgaacctttcttttgattgagcagcttggaaacagtatttctgtagaatctgcaaagagatatttgtgagtgctttgaggtgtatggtgaaaaagaaataccttcacatgcttatgacctgaatggtattgcctaggttttcctctaggatttttattttttagatctaacatgcaagtctttaatcaatcttgaattaatttttttatagggtgtaaggaagggatccagtttcagctttctacatatggctagcaggttttcccagcaccatttattaaataaggaatccattcccccttactagtttttgtcaggtttgtcaaagatcagagagttgtagatatgtggcattatttctgagggctctgttctgttccattgatctatacctctgttttggtacaagtaccatgctgttttggttactgtagtcttttaatatgatttgaagtcaggtagcgtgatgcccccagctttgttcttttggtttaggattgacttggtgatgtgggctcttttctggttccatatgaactttaaagtagtttttccaattctgtggagaaagtcattggtagcttgatggggatggcattgaatctataaattaccttgggcaatattgtcattttaacgatattgattcttcctactcatgatcatggaatgttcttccgtttgtttgaattctcttttatttcattgagcagtggtttgtagttctcatttaagaggtccttcacatcccttctaagttgcattcctaggtattttattctctttgaaacaattgtgaatgggagttcactaaaactccaaaagcaatggcaactaaagacaaaattgagaaatgggatctaattaaactaaaaagcttctgcacagcaaaagaaactaccatcagagtgaacaggcaacctacaaaatgggagaaaatttttgcaacctactcatctgacaaaggggtaacatcaagaatctacaatgaactcaaacaaatttacaagaaaaaaacaaacaaccccatcaaaaagtgggtgaagaatatgaacagacacttctcacaagaagatatttatacagcaaaaaaaaaaaaaaaaacataaaaaatgctcatcattactggccatcagataaatgcaaatcaaaaccacaatgagataccatctcacaccagttagaatggtgatcattaaaaagttaggaaacaacaggtgctggagagggtgtggagacacaggaacacttttacactcttggtgggacggtaaaataattcaaccattgtggaagtcagtgtggtgattcctcagggatctagaactagaaataccatttgacccaaccatcccattactgagtatataaccaaaggatgataaatcatggtgctataaagacacatgcacacgtatgtttattgtggcactattcacaatagcaaagacttggaacctacccaaatgtccaacaacgatagactggattaagaaaatgtggcacatatacaccatggaatactatgcagccataaaaaatgatgagttcatgtcctttgtagggacatggatgaaactggaaaccatcattctcaggaaactatcacaaggagaaaaaaccaaacactgcatcttctcactcataggtgggaattgaacaatgagaacacatggacacaggaaggggaacatcacgctctggggactgttgtggggtggggatagggtggagggatagcatttggagatatacgtaatgttaaatgatgagttaatgggtgcagcacaccaacatgacacatgtatacatatgtaacaaacctgcaaattgtgcacctgcaccctaaaacttaaagtataataataataaaataaaataaaaaaagatatcttcacataaaaaatagaaagaaggtttctgagtaacttctttctgatggctgcattcatctcacagaggtaaacctttcttttcattgagcagactacaaactctgttcttgtaggatcttcaaagtgatttttatgagcactttgagtcctatggtgaaaaatgaaatatcttcacataaaaactagacagaaactttctgagaaacttctttgtgatgtgtacattcatctcacagagttgaacctctcttttgattgagcagtttttaaaccatctttttctggaaactgcaaaggcatatttgtgagtgttttgaggcttacgatgaaaaaggaaatatcttcacataaaaactagacagaagcattttgtgaaacttctttgtgatgtgtgcattcatctcacagagttgaccctttcttttgattgagctgtttggaaacaattttttgtagaatcttcaaagggatgcttgtgagttctttgaggcctatggtgtaaaatgaaatatcttcacataaaaaccagacagaaatctgagaatgggcagactgcctcctcaagtagctccctgatcctcttgtagcctaactgggaggcacccccagcaggggtgtactgacacctcacatggccaggtactcttctgaaacaaaacttccagaggaccgatcaggcaacagcatttgtggtttaccaatatccgctgttcttcagccactgctgctgatacccaggcaaacagggtctagactggacctccaacacaccctaacagacctgaagctgagagccctcactgttagaaggaaaactaacaaacagaaaggacattcacaccaaaaacccatccgtatgtcaccatcctcaaagaccaaaggtagataaaaccacaaagatgggcataaaacagagcagaaaaactggaaactctaaaaatcagagtgcctctcctcatccaaagaacaccgctactcaccagcaatggaacaaagctggacagagaatgactttgacgagttgagagaagaaggcaacagacgatcaaactactctgagctaaagggggaagttcaagcgaatggtgaagagtttaaaaaccttgaaaaaaaattagacgaatggctaactagaataaccaatgcagagaagtccttaaaggaagtgatggagctcaaaaccaaggaagaagaactaattgatgaatgcagaagcctcagtagctgatgcgatcaactggaagaaagggtatcagtgatggaagatgaaatgaatgaaatgaagtgagaggagaagtttagaggaaaaaagaataaaaagaaatgaacaaagcctccaagaaatataggactatgggaaaagatcaaagctacgtctgattggtgtacctgaaagtgactgggagaatggagccaagttggaaaacactctacaggatactatccaggagaacttccccaatctagcatggcaggacaacattcaaattcaggaaatacagagaacaccacaaagatactccaagacacataattgtcagattcaccatagttgaaatgaaggaaaaaaatgttactggcagccagagagaaaggtcgggttacccacaaagcgaagcccatcagactaacagctaatttctcaggagaaactctacaagccagaagagagtgggggccaatattcaacattattaaagaaaagaattttcaacgcagaatttcatatccagccaaactaagcttcataagtgaaggagaaataaaatactttacagacaagcaaatgcggagagattttgtcaccaccaggcctgcccttaaaagagctcctgaaggaagcactaaacatggaaaggaacaaccagtaccagccactgcaaaaacacgccaaattgtaaagaccatcaaggctgggaagaaactgcataaactaatgagctaaataaccagctaacatcataatgacaggatcaaattcacacataacaatagtaaccttaaatgtaaattggctaaatgctccaattcaaagacacagactggcaaattggataaggagtcaagacccatcagtgtgctctattcaggaaacccatctcacgtgcacaaacacatatagactcaaaataaagggatggaggaagatctaccaagaaaatggaaaacaaaaaaaggcagggattacaatcctagtctctgataaaacagattttaagccaacaaagatcaaaacagacaaagaaggacattacataatggtaaagggatcaattcaacaagaagagctaactatcctaaaaatatatgcacccaatacaggagctcccagattcataaagcaaggccttaatgacctacaaagagacttagactcccacacaataataatgggagactttaacaccccactgtcaatattagacagatcaacgagacaaaaagttaacaagtatatccaagaattgaactcagctctggaccaagcagacctaatagatatctacagaactctccaccccaaatcaaaagaatatacattatttcaggaccacaccagatctattccaaaattggccccatagttggaagtaaagcactccttagcaaatgtaaaagaacaaaaattataataaactgtctctcagaccgccttgcaatcaaactagaactcaggatcatcctagccatcagagaaatgcaaatcaaaaccacaatgagataccatctcacaccagttagaatggcgatccttaaaaagtcaggaaacaacaggtgctggagaggatgtgaagaaataggaacacttttacactgttggtgggactgtaaactagttcaaccattgtggaagtcaatgtggcgattcctcagggatctagaactagaaataccatttgacacagccatcccattactgggtatatatccaaaggactataaatcatgctgctataaagacacatgcacacgtatgtttattgcggcactattcacaatagcaaagacttggaaccaacccaaatgtccaacaacgatagactggattaagaaaatgtggcacatatacaccatggaatactatgcagccataaaaaatgatgagctcatgtcctttgtagggacatggatgaaattggaaatcatcactttcagtaaactattgcaagaacaaaaaaccaaacaccacataaactcactcataggtgggaattgaacaattagatcacatggacacaggaaagggaacatcacactctggggactgttgtggggtgcggggaggggggagggattgctttaggagatatatctaatgctaaatgatgagttaatgggtgcagcacaccagcatggcacatgtatacatatgtaactaacctgccgttgtgcacatgtaccctaaaacttaaagtataatagtaataaaataaaataaaaaaatagaaaaaaaccactcaactacagggaaagtgaacaacctgctcctgaatgactactgggtatgtaacgaaatgaaggcagaaataaagatgtcccttgaaaccagcaagaacaaagacacaacgtaccagaatccctgggacacattcaaagcagtgtgtagagggaaatttgtagcactaaatgcccacaagagaaagcagaaaatatccaaaattgacaccttaacatcacaaataaaataactagaaaagcaagagcaaacacactcaaaagctggcagaaggcaagaaataactaagatcagagcagaactgaaggaaatagagaaacaaaaaacccttcaaaaaatcaaagaatccaggaggtggatttttgaaaagatcaacaaaattgatagaccgctagcaagactaataaacaagaaaagagagaagaatcaaataaatgcaataaaaaatgataaaggggatatcaccactgatcccacagaaatacaaactaccatcagagaatactataaacacctctacacaaataaactaggaaatcgagaagaaatggataaatttctcaacacatacatccaagactaaaccaggaagacgttgaatctctgaatagatcaataacaggctctgaaattcaggcaataatccatagcttaccaaccaaaaacactccaggaccagatggattcacagtcgaattctaccagaggtaaaaggaggagctggtaccattccttctgaaattattccaatcaatagaaacagaggaaatcctctctaactcattttatgatgccagtaccatcctcataccaaagcctggcagagacacaacaaaaaaagagaattttagacctatatccttgatgaacattgatgcaaaaatcctcaataaaatactggcaaaccgaatccagcagcacatcaagaagtttatccaccatgaccgagggggcttcatccctgggatgcaaggctggttcaacatacacaaatcaataaacataatctagcatataaacagaaccaaggacaaaaaccacatgattatctctatagatgcagaaaaggcctttgacaaaattcaacaaccttcatgctaagaactctcaataaattagatattgatgagacggatctcaaaataataagagctatctatgaaaaacccacagccaatatcatactgaatggaaaaaaactggaagcattccctttgaaaacttgcacaagacagggatgccctctctcaccactcctgttcaacatagtgttggatgttctagccagggcaatcaggcaggagaaaaaaataaagggtattcaattaggaaaagagagagtcaaattgtccctgcttgcagatgacatgattgtatatctagaaaactccatcgtctcagcccaaaatctccttaagctgataagcaacttcagcaaagtctcaggatacaaaatcaatgtacaaaaatcacaattcttatgcaccaataacagacaaacagagagccaaatcatgagtggactcctattcacaattgcttcaaagagaataaaatacctaggaatgcaacttacaagggccatgaaggacctcttcaaggagaactacaaaccactgctcaatgaaataaaagaggatacaaacaaatggaagaacattccatgcacatggggagaaataatcaatatcgtgaaaatggccatactgcccaaggtaatttgtacatttaatgccatctccatcaaacttccaatgactttcttcacagaattggaaaaaactactttaaagttcatatggaaccaaaaaagagcccgcatcaccaagtcaatcataggccaaaagaacaaagctggaggcatcatgctacctgacttcaaactacactaaagggttatggtaaagaaaacagcatagtactggtactaaaacgaagatatagaccaatggaacagaacagagccctcagaaacaatgccacatatctacaactctctgatctttgacaaacctgacaaaaacaagcaatggggaaaggatttcctttttaataaatggtgctgggaaaactggctagccatatatagaaagctgaaactggatcccttccttaaaccttatagaaaaattaattagacatggattaaagacttaaatgttagacctaaaaccataaaaaccctagaagaaaacgtatgcaatgccattcaggacataggcatgggcaaggagttcatgtctaaaacacaaaaagcaatggcaacaaaagccaaaattgacaaatgggatctaattaaactaaagagcttctgcacagcaaattaaactaccatcagagtgaacaggcaaccaacagaatgggagaaaatttttgcaaactacttatctgacaaagggctaatacccacaatctacaatgaactcaaacaaatttacaagaaaaaaaaaacaaccccatcaaaaagtgggtgaaggataagaacacacacttctcaacagaagacatttatgcatcaaaaaaacacatgaaaaaatgctcatcatcaccggccatcagaaaaaatgcgaatcaaaaccacaatgagataccatctcacaccaattagaatggcaatcattataaagtcaggaaacagcatgtactggagaaaatttggagaaatcggaacactcttacactattggtgggactgtaaaatagttcaaccactatggaagtcagtgtggtgattcctcaaggacctagaacaagaaataccatttgacccagccatcccattgctgggtatatacccaaaggattataaatcatgctgctataaagacacaatcacacatatgtttattgtggcaatattcactatagcaaagacttggaaccaacccaaatgtccaacaatgatagacgggattaagaaaatgtggcacatatacaccatggaatactatgcggccataaaaaatgatgagttcatgtcctttgtagggacatggatgcagctggaaaccatcattctcagcaaactatccaaggacaaaaatccaaacaccacatgttctcactcagaggtgggaattgaataatgagaaaacatagacacagaaagggaaacatcacaaaagggggaatgctgtggggtggggggagtggagagggattgcattaggagatatacctaatgataactgacgagttaatgggtgcagcacaccagcatggcacatgtatacatacgtaacaaacctgcacattgtgcacatgcaccctaaaacttacagtataataataatagaataaaaaaaataaaacttctctctagtttttatgtgaatatacttgtttttcaccataggcctcaaactgctcacaaatattcctttgcagattctacaaaaagactttttccaaactgatcagtcaaatcaaatgttcaacactgtgagatcaatgcacacatcatgaagatgtttctcagaaagcgtctgtctagtttttatgtgaagatatttcctttttcaccacaggcctcaaagtgctcaaaagtatccctttgcagattccacaaagagactgtttccaaactgctcaatgaaaagaatcatttacatctctgaaatgaatgcacacaacacaaagcagtttctctgaaaaacctgtctagtttttatgtgaagatattccctttttcaccataggccacaaagggctcacaaatatccctttgcagattctacaataaaactgtttccaaaatgctcaatcaaaagaaaggttcaactctgtgagatgaatgcacacatcagaaagaagtttctcagaaacttctgtctagtttttatgtgaacatacttcgtttctcaccataagtctcaaagcactcacaaatatccctttgaatattctacaagaacagaggttccaatctgctcgattaaataaatctttccttctgtgagatgaatgtacacatcacaaatcagttcctcagaaaccttctttctagttttaatgtgaagacatttctttttcaccataggcctcaaagctctgacaaatatccctttgcacattctgcaaaaagactgtttcaaagctgctcaatcaaaagaatggatcaacactgtgagatgaatgcacacatcacaaagaagttcctcagaaagatttttctagtttttatgtgaggatattttcctttttgccataggcctcaaaccgctcaaaatatccctttgcagattctaccaaaagactgcttccggactgctcaatcaaaagaaagttcaactctgtgagatgaatgcgcacatcacaaagaaatttctcagagatcttttgtccagtttatgtgatggtatttcctttttcaccataggtctcaaagcactcacaaatatccctctgcagatgctacaaaaagactgtttccaaactgctcaatcaaaagaaaggttcaactttgttagatgaatgctcacatcacaaagaagtttctcagaaagtttctgtctattttttatgtgaagatatgtcctttttcaccataggactcaatgtgctcacaaatatccctttgcagatactacaagaacagattttccaacatgctcaatgaaaagaaacttttacctctgtgagatgaatgcacacatcacaaagcagtttctcagaaaccttctgtctagtttttatgtgaagatacttcccttttcaccataagcctccaatcgctcacacatatccctctgcagattctacaaacaaactctttccaagttgctcaatgaaaagaaagtctcaactctgtgagatgaatgcacacatcacaaagaagtttctcagaaagagtttctcttgtttttatatgaagatacttcctttttcacaataggtctcaaaaagctcccaaatatacctttgcagattctagaaggagacagtttccaaagtgctccatgaaaagaaacggtttcttctgtgatatgaatgcacacatcaaaaagcagtttctcagaaagcttctctgtactttttatgtgaagatatttcctttttcaccatagagctcaatgtgctcccaaatattgctttttagattctacaaaaagtctgtttccaaactcctctatcaaaagaatggttcatctctgtgagatgaatgcacacatcacaaagaactttctcaggaagcttccatctggttttcgtgtgaaggtgtttcctttttcaccatagggctcaatgcgttcctaaatattcctttgtagatcctacaaaaagacactttcaaaactgcccaatcaaaaggatggttcacctctgtgagatgaatgcacacattccacagaagtttctcagaaagcttctctatagtttttatgtgatgatatatactttctcaccataggcctcaaggcactcacaggtatccctatccagatactagaagaacagagtttccaaactgctcaatgaaaagaaacgtttacttctgtgagatgtatgccgaattcacaaagcagtttctcagaaagcttcttcctagttttaatgtcaagatttttttttcaccataggcctcaaagcactctcaaatatccctttgcagattctacaaaaaggcttttgccaaattgcttaatcaaaaggatggtgcaactttgggagatgaatgcaagcttcacaaagaagtttcacagaaaacttcggtctagttctaatgtgagaatatttcctttttcactataggccttaaagcactcaaaatatccctttgcagatcttccaagaactgattttccaaactgctcaatgataagaaacttttacctctgtgaaatgaatgcacacatcacaaagaagtttctcagaaagcttctttctagtttttatgtgaagatatttccttttacaccataggcctcagcgtgctcccaaatatccctttgcagattctacaaaaactgttaccaaactgctcaaacaaaagaatgtcacagctctgtgaggtgaatgcacacatcaaaaagatgtttcacagaaagcttctgtctagtttttatgtgaagatatttcctttctcaccataggactcagtgcgctccccaatatctgtttgcagactctacaaaaagactgcttccgaagtgctcaaagaatggttccactcggtgggatgaatacacacatcacaaggaagtttctcagaaagcttttgcctactctttctgtgaaggtatttcctttttcaacatttacctcaaatcactcacaaatatcccattgcagattggagaagaacagagtttccaaacttctcaatgaaaagaaacgtttgcttctgtgagatgaatacacacatcacaaagcagtttcttagaaagcttctgcctagtttttatgtgaagatatttcctttttcaccatagacttcaatgcactcccaaatatccctttgcagattctacaaagagaatatttgccaactgctcaatcaaaacaatggtccaaatcagtgaaatgaatgctctcatcacaaagaagtctgtcagtaagcttctatctagttcttatgtgaaggtattttctttttctccctagccctcaatgcactcccatatatccctttgcagattctacaaaaagaatgtttccaaactgctaaatcaaagaatggttccactctgtgaggtgaatgcacacatcacaaagaagtttctcagaaaatttctgtcaattttttatgtgaagatatttcctttttcaccataggtcccaaagctctcacaaatatcccttggcagattctacaaaaagacggtttccaaactgctcaatgaaaacaaacatttagatctgtgagatgaatgcacacatcagaaagcagtttctcagaaagcttctttctatttttactgagaagatatttcctttttcaccatagacctcaatgcagtatgaaatatccacttgtagatactacaaaagactgtttccaaactgctcaatcaaaagaatggttcagctatgtgagaagaacgcacacatcaaaaagaagtttctcagaaagttttttcctagttttcatgagaagatatatcctttttcatggtatgccacaaagcgctcacaaatatccctttgcagattctagaagaacagttttcatactgctcaatgaacagaaacatttacctctgtgagttgaatgcacacataacaaagcagtttctctgaaagattctttcaactttttttatgaagaaatttcctttttcatcataggcctcaaagcactcccaaatatccctttgcagattctgcaaaaagactgtttccaaactgctcaatcaaaagaatagttcaactctgtcagatgaatgcacacatcacaaataagtttctcagaaaacttctgtctagttttcctgtgaagatatttcctttttcaccatagacctcaaagtgctcacaaatatccctttgcagattctagaagaatagagtttccaaaatgctcattgaaaagaagttttacctctttcaggtaaatgcacacatcacaaagcagtttctctgaaagcttctttctagcttttatgtgaagatatttcatttttcaccatagacctcaaggtgctcctatatatacttatgaagattctacaaaaagactgtttccaaactgctcaatcaaaagaatgattcaactctgtgagatgaatgcacacatcacaaagaagtttctcagaaaacttctctttagttcttatatgaagatatgtcctttttcaccataggtctcaaagcactcacaaatatccccttgcagattccagaagaatagagtttccaaagtgctccattaaaagaaacgtttacctctgtgatatgaatgcatgcatcaaaaagcagattctcagaaggattctttctactttttatgtgaagatatttcctttttcaccataggcctcaaagcactctcaaatgtccctttgcagattctacaaaaagacttttccaaactgctcaatgaaagaatgattcaactcagtgagatgaatgcagacatcacaaagaagtttctcagaaaacctctgtatagcttttatgtgacaatatttcctttttcatcataagcctcaaagtgctcacaaatatccctgtgcagaatctagaagagcagagttgccaaactgctcaataaaaagaaacgtttacctctgtgaaatgaatgcacacatcacaaaccagtttttcagaaagtttctttctagtttttatgtgaagatatttcctttttcaccatagacctcagtgcgctcccaaatatccctttgcagattctacaacaggacagtttccaaactgctcaaacaatagcatgtcacagctctgtgaggtgaatgcacacatcacaaagatgtttcacagaaagcttctgtctagtttttaggtgaagatatttactttttcaacataggcctcaatgcactccccaatatccctttgaagattctacaaaaagactgcttacaaagtgctcaatcaaaagaattgttcaactctttgagatgaatgcacacatcacaaggaagtttctcagaaagctgctgtctatttatatgtgaaggtatttcctttttcaacatttgcctgaaagcactcccaaatatccctttgcagcttctacaaaaagagtgtttctaaattgtgcaatcaaaaggattgttcaactctgtgagatgaatgcacacatcacaaagaactttctccaaaatcttctgtctagtttttatttgaagatatttcctttttcaccataagcctcaaagtgctcacaaatatccctttgcagattctagaacagtgtgtccaaactgctcaattaaaagaatctttaccactagagatgaatgcacacatcacaaagaagtttctcagaaagcttctttgtagtttttatgtgaaggaatttcgtttttcaccataggcctcagcgtgcccccaaatatccctttttagaatctgcaaaaagactgtttccaaaccgctctatgaaaagaatggttcaactctgtgagacgaatgcacacatcacaaagacgtttcttagaaagtttctgtgtggtttttatggaaagatacttcctttttcaacataggctgcaaagtgctcacaaatatccatttgcagcttctagaagaacagggtttccaaactgttcagtgaaaagaaacctttacctctgcaagtttaatgcacatatcaaaaagaagtttctcagaattcttctttctagtttttatgtgaagatatttcctttttcaccatagggctcaatgcactcccaattatccctttgcagtatctatgaacagactgtttacaaactgctcaatgaaaggaaagtttcaactctgagatgaatgcccacatcacaaagaagtttcccagaaagcttctgtctagtttttgtgtgaagatacttcctttttcaccataggcctcaacgcactcccaaatatcccttttcttgattgtacaaaaagactgtttccaaactgctctatgaaaggaatggttcaactctatgcgatgaatgcacacatcacaaaggagtttctcagaaagcttctttctgctttttatatgaagatatttcctttttcacaataggccgcaaagaactcacaaatatccatttgcagcttctagaagaacagagtttccaaactactcagtgaaaagaaacctttacctctgtgagttgaatgcacacatcacaaacaagtttctcagaatgcttctttctagtttttatgtgaagatatttccttttcacaagagctcaacgtgctcccaagtatccctttgcagtttctatgaacagactgtttccaaactgctcaatgaaaagaaagtttcaactctatgagatgaacacccacatcacaaagtagtttcccagaaagcttctgactagtttttatgtgaggatatttcctttttcaccataggccacaaagggctcaaaaatatgcccttgcaattcaacaaaaagactgtttccaagcagctcaccaaaagaaatgttcaaccctgagatgaatgcacacatcacaaagaagtttctcagaaagcttctttctagtttttatgtgaagatatttcctttttcaccatacacttctaagcactccaaatatccatttgcagattctagaagaacaggttttccaaactgctcaatgaaaacaaacttttacctctgggagatgaatgcacacatcacaaagcagtttctcagaaagtttcttcctagtttttatgtgaagatatttcgtttttcaccataggactccaaatgttcccaaatatccctttgctgattgtacaaaaagactgtattgaaagtgctcaatcaaaagaatagtccaactctgttagaggaatgcacacatcacaaagaagtttctcagaaagattctgtctagtttttatgtgaagatatttcctttttcaatgtaggcctcaaagaactctcaaatattcctttgtagatgctagaaaaacagagtttccaaattgctcaatgaaaacaaatgtttacctctgtgagatgaatgcccagatcacaaagctgtttctcagaaaggttctttctagtttttaagtggagatatttcctttttcagcatagatctcaaagctctgaaaaatatcacttaacagattctacaaaaagactgcttccaaatggctcaatcaaacgaatgcttcaactctgtgagataaatgcacaagtcaaaacgaagtttctctgaaatcttctgtctagtttttatgtgaagatatttcctttttcaccataagcctcaaaacactcacaaatatccctttgcagattccagaagaacagtttccaaactactcaatgaaaaaaaaaaaaatttacctctgtgggatgaatgcacacatcacaaagcactttctcagaaagcttctttctactttttatgtgaagatatttccattttcagtataggcatcaaagcactctaaaatatccgtttgcagattccacaaaaagactgtttccaaactgttcaattaaaagaatgtttcaactgtgtgagatgaatgcactcgtcacaaagaagtttctcagaatggttctgtgtggtgtttttgtgaagatatttcctttgtcaccgtaggcctcaaggcactcacaaatatcccttttcagattctggaagaacagagtttccaaactgctcaatgaaaagaatcatttacctctgtgagatgaatgcacatatcacaaagaagtttctcagaaagcttcttttaagtttttatgtgaagatatttcctttttcaccttaggtctcaaagctctccctgatatcctttggcagaatgtacaaaaatactgtttccaaactgctaaatcaaaagaatggttcaactctatgacacgaatgaacatatgatgaagaagtttctcagaaatcctgtgtctagtttttatgtgaagatatttccttttcaccgcaggcctcaaagcactcaaaaatatccctttgcaaattctagaataacagagtttccaaacttctcaatgaaaagaaagttttacctctgtgagatgagtgcaaacatcctaaaccagtttctcagaaagcttctttctacttttcatatgaagatatttcacttttcaccataggcctcagcacactcccaaatatccctttgcagattctataaaagactgtttccaaactgctcaattgaaagtatggatcaactctgggaaaggaatacaaacatcataaagaagtttctcagaaagcttctgtctggttttcatatgaagatatttctattttcaccatagtcctcaacatgttcccaaatatccccttgcagatgccaaaaacagactgtttccgaattgctctatcaaaagaatggttcagctctgtgtgatgaatgcacacattacaaagaagtttctcagaaagattctgtctagtttttatgtgaagatatttattttttcaccataggtatcaaagcactcacgaaaatccctttgcagattctagaacgacagagtttccaaagtgctgaatgaaaagaaatgtttacctctgtgagataaatgcacacatcatagagaagtttctcagaaagcttgtttctagtttttatgtgaagatatttcctttttcaccataggcctcaaagagctcccaaatatccctttacagattctacaaaaagactgtttccaaactgctcaatcaaaagaatggttgacctccacgagatgaatgcacacatcattaagtagtttctcagaaagcttatttcttgtttttatgtgaagatatttattttttcaccataggtatcaaagtgctcatgaatatctctttgcagattctacaacaacagggtttccggagtgctcaatgaaaaggaatgtttacctctgtgagataaatgcacacatcataaagaagtttctcagaaagcttgtttctagtttttatgtgaagttatttccttttcaccacaggcctcaaagtgcacccaagtatccctttgcaggttctccaaaaacactatttgaaactgcacaatcaaatgaatggttcatctctgtgggatgaatgcacacatcacaaagcagtttctcagaaagctgttttctagtttttacatgaaggtatttcctttttcaccacaggcatctaagcgctccaaaatatcccttttcagattctgcaaaaagactgtttccaaactgttcaatcaaacgaatggttcaagtctgtgagatgaaggcacacatcacaaaggagtttctcagaaagcttctttctagtttttatatgaagatatttcctttttcaccataggcctcaaagtgctcccaaatacacctttgcagattctccaaaaacagtttccaaactgctcaaccaaacgaatggttgatttttgtgaggtgaatgcacacatcacaaagcagtttctcaggaagcttctgtctagtttttatgtgaagatatttcctttttcaccataggcctcaaagtactcacaaatattctttgtagattgtagaagaacaatgtttccaaacgtctcaatgaaaagaaatgtttacctctgtgagatgaatgttcacatcacaaagcagtttcttagaaagcttcttcttgtttgcatgtgaagataattcctttttcaccatagatctcaaagcgctcacaaatatcccttttcagattctagaagaacagagtttccaaactgctcagtcaaaagaattgttcaactctgtgagatgaatgcacacatcacaaagtagtttctcataaacttctgtctaattttgatttgaagatatttcctttttcaccatgagcctcaaagcattcccaaatatccctttgcagtttctacaaaaagactgtgtgcgaactggtcaaacaatagaatggttcaacttggtgagatgaatgcacacatcacaaataagtttctcagaaagcttctgtctagtttttatgtgaaaatatttgctttttcaccatagaaaaacaaaataacttcagataaaaacaagaaataagctttctgagaaactgcattttgatgggtgcatttgtctcacagagtttaacagttcttttgattgagaagttttgaaaagctgtttttttcccattctaggaatggacattcagtagctcctttagtccgttggtgaaaaagtggatttcccagtattaaaactagaaggaagctatctgagaaaccgctttgtgatttttgtattcctttcacatagtgaaatctttctttttattcagctgttaagaaacactgttttttagaatctgcaaagggatatcggaagcacatacaggcctatggtgaaaaagaaaataacttcagataagaactagaaagaaactttctgagaaactgctttgtgatgtgtgcattcatctcacaatgttaaacctttctttgattcagcattttggaaacagtttttctctattcagcaaatggacatttgggagttcattgaggccaatggcaaaaaagcaaatatcgcaggatacaaactagaaagaagctgtctgacaaaccgctttgtgatatgtgcattcttctcacagagataaaccattcttttcattaagccatctggaaacagtttttgtagaatccgtgaagggatatttgggagctctttgaacctattggggaaagagcaaatatccaaggataaaaactagaaggaaattatctgaaaaacctctttgtaatgtgtccgttcatctttcaaagttaaacccttcttttcattcaggagtttggaaacactgtttttgtagagtctgcaaagggatattttggagtgcattgagacctgcagtgaagaagaaaatatcttcagataaacacaagaaagaaactttctgagaaactgctttgtgatgcatgcattcatctcacagacttaaacctttcttttgaatcagcagtttggaaacactgtttttgaagaatctgcaaaaggatatttgggagcacattgagtcctgtggagagaaagaaattatctttacataaaaactagaaataagcttttggagtaactgctctgtggtgtgtgcactaatctcagagataaacctctcttttcattcaactctttggaagcagtgtttttttagaatctgtgaatggacatctgggagtatattgaggctgatggtgaaaaataaaaaatcttcagataaaaactagaaagaacctttctgagaaactgctttgtgatatgtgcattcatctcacagaattaaacttttctttgattctgcagtcttgaaagcctgtttttgtccattcagtgaatcaacatttgggaatacactgtggccaatggtgaaaaagcaaatatcccaggataaaaattagaaggaatttttctgagaaaccaatttctgatgtgtgcattcatcttgcagagttaaaacttccttctcattcagcagtttggaaacactgtttttgtagaatctgcaaagggatatttgggagtgcattaaggcctgtggtgaaaaagacaatatattcgataaaaactgaaaagaagctttataagaaactgcactcctctcacagagttaaagctttcctttgattcagaggtttggaatcactctttttgttgaatctgtgaagtgatatttgggagcgctttgagacctatggtgaaaaacaaaatatctttagataaaaactagaaagaagctttctgagaactcctctgtgatatgtgcattcatctcacagagttaaacattccctttgattcagcagtttggagacactgtttttgtccattctgagaatggacaatttttaagctcattgaggccaatggcaaaaaagtaaatatcactggataaaaactagaaggaaattatctgagaaactactctattatgtgtgcgttcatctcgcagagataaacagttcttttcatcaagcagtttggaaatattgtttttgtagaatcttccaagggatatttgggatatcattaaggccaaagacaaagaaaatatcccgggtaaaaactagaaggaagctgtctgagaaactgctttgtgatgtgtgcattcatctcacagaggtaaacctttcttttaattcagcagtttggaaacactgtttttgtccattctgtgaatgaaccatttggagctcattgagacaaaggaggaaaaaggtaatatcccatgataaaaatgagaaggaatctatttaagaaactgctttgtgatgtgtgcattcatctggccgagttaaaccataagtttcattcagcagtttgaaaacacggttttcgtaaaatctgcaaaatgatatttgagagcactttgaggcctatggtgagaaaaaaacaatgttcaggtaaaaaatagaaaaatgctttctaagaaacagctttgtgatgtgtgcattcatctcacagagttaaacctttattttgattcagcagttttgagacactgtttttttccattctgtgaatggacatttgggagctaattgaggcaagaggggaaaaagctaatatcccatgataaaaactagatagaagctatctgagagactgctttgtgatgtgtgcattcatcttgcagagtgaaatctttcttttcattcagcagtttggaaagacaatttttgtaaatctgtgaagggatatttgggagctcattggtgccaattgcaaaaagctagtatcccaggataaaaatgtgaacgaaggtatctgagaaacggctttgtgatgtgtgcattcttcttgcagactgaaatctttcttttcattcagcagtttggaaacactgtttttgtaaaatctgcaaagggatctttgggagcactatgagtactatggtgaaaaagaaaatatcctcagataaagagtagaaagtagctttctgagaaactgctttgtgatgtgtgcattcatctcatggagttaaaactttattcttattcaggaatttggaaatcctgtttttgcccattctgcaaactcattgatgccaatggtgaaaaagcaaatatctccggataaaaaatggaaggaagctatctcagaaacagctctgtgatgtgtgcattcatctggcagagttaaacctttcttttcattcagtagtttgtaaacactctttttgtagaatctgccaaggtgtatttgggagcactgtgagacctatggtgaaaaataaattatcttcaatgaaaagtagaaagacggtatctgagaaactactatgtgatgcgtgcattcatctaacagagtgaaaactttcttttcattcagcagtttggaaacactgtttttgtagaatctgtgaagggatatttgggagcacattgaggcctatggtcaaagaggaaatatcttgagataaaaggtggaaggaagctttatgagaaactgctttgtgatgtgtgcattcctctcacagagttaaacctttcttttgattcagcagtgtggaaacactgtttttgcccattatgcaaatgtacatttgggagctcataaaggtcagtggcaaaaaagcgaatatcccaggataaaaaccagaaggaagctttctgagaaatcactttgtgatgtgtgcatttgtctcacataatgaaatctttcttttcattctgcagtttggaaaaactatttttgttgaatctgtgaagttgtatttcagagtgcatagggagctattgtgaaaaaatatatacattcagataaaaagttgaggaagcatttgagaaactgcattctgttgtgtgcattcatctcacagagttaaacttttcttttcattcagcagtttggaaatactattttttttccattctctgagtggatatttggaagctctttggggccagtggtgaaaaagctgatatccctggataaaaactagaaggaagctctgtgagaaactgctttgtgatgtgtgcattcatctcacagatttaaaactctcttttgatagaatagtttggaaacactgtttttgtagaatctgtgaagggatatttgaaatcacattgattcctatggtgaaaaaggaaatatcttcacataaaaactagaaaacagctttatgagaaactgctttgtgatgtgtgcattcatctcacagagttaaagctttcttttgtttgagcagtacgaaaaaaatgtttttttggggaacctacaaagggatatttgagagcaccttgagacataaggtgaaaaaggaaatttcttcagataaaaacaggaaagaagctgtctgagaaggtgcttaatgatgtgtgtgttcaactcacaacaataaacttttcttttgattcagcagtttgggaacactgtttatgtagaatcataacagagagggagagcagtgaggcatagggtgaaaaagaaaatatctccatataaaaactagaaagaagctttctgagaaactactttgtgtgtgtgcattcttctcagagagttaaacctttattatgattgagcagtttggaaacactgtttttgtagaatctacgaagggatatttgggaccgcattgaggcctttggtgaaaaaggaaatgtcttcagagaaaaactagaaagaagctttctgataaacggctttgtaatgtgtgcattcatcatacagaggtaaacctttcttttgattgagctgtttggaaacactgtttttgtagaatctgcaaaggcatatttggaagaactttgaggcctatggtgaaaaacggattatcttcagaggcaaacaactagaaagaaactttctgagaaactgctttctgatgtgtgcattcaactcacagagttaaacctttcttttgattgaatagttaggaaacactgtttttgtaggaactgtgaagagatattttggaacacattgaggcctgtggtgaaagaggaaatatcttaagatacaaactagaaagaagatttctgagacagtgctgtatgatgtgagaattcatctctcagaggcaagcctttcttttgattgagcagtttggaaacaatgtttttgtagaatctgtgaagggatattttgaagcgcattgagtcctatgatgaaaacccatatatcttcagataaaacctatagacatgctttctgatgaactgctttgtgatgtgtgcattcacctgacagacttaaaccattcttttgattgagtgcgttgtaatcactctttttgtagaatctgcaaaggggtatttgtgagcacattgaggcatatggaggaaaatgaattattttcagattagaaactacaaagaagttttctgagaaactgctttgtcatgtgtgcattcatctcacagagccaaaactttcttttgatggagcagtttgaaaacactgtttttgtacaaactgcaaaagtatatttgggagagcattgagacctatggtgaaaaaaatatgcttcagataaaacaggaaagaagctttctgagaaactgtttttgatgtgtgtattcatctcacacagctaaacctttctcttcattgagtagtttggaaacactgtttttgtaaaatctgtgagggggatcttggagcacactgaggcctatggtgaaaaaggaaatatcttcagataaaaaataaaaagaagcttcttagaaactgcttagtttgtgtgcattcatctcacacagttaaaactttcttttggttgagcagtttggaaactctgtttttgtagaatctgcaaagggatatatggcagcacattcaggcctctgctgtaaaaggaaataccttcagataaaaactagaaaaaagctttgtgagaaactgctttgtgatgaatgcattcatctcaaagaggtaaatctttcttttcattgagcagttttgcaacactgttttttgggaatctgagaagggatatttgggagcattttaaggcctatggtaaaaaataaaatatcttcagataaaaactagaaggaacctttctgagaaactgctttgtgatgtgtgcattaatctaagagttaaaactcttttttggattgagcagtttggaaaaactttttctatagaatctgtgaaggcatatttaggagcgcttggaggcatatggtgaaaaaggaaatatcttcagagaaaaacaaggaagaagctttctggcaactgctttgtgatgtgtacattcatctcacagagttacaatgttattttgattgagcagtttggaaatactgtttctgttaaattggccaaaggatatttgggagcgcattgaagctgagagttaaaaaggaaacatcttaaaataaaaagtagaaagaaactttctgagaaactgctttgtggtgtatgcattcatctcacagggttaaacctttcttttgattgagcagtttggagaaagtgttttggtagactgtgcgaagggatatttgggagcacttgaggcctatggtgaaaaaggaaatatcttcagatacaaactaaagaaaaagcctttttataaaccactttgggatgtgtgcattcttctcacagagttaaacatttttattaattgtgcagtctggaaacactgtttttgttgaatctatgagttgacatatgggagtgcattgaagccaaacgtgaaaaagtaaatatattggaagaaaaactagaaagaagctatctgagaaactgctttgtgatgtgtgcattcgtctcaaagagttaaacctttcttttgattgagaagttcagaaacagtttttgtacaatctgcaaagggatatttggggagagtttgaagcctatggtgaaaaaggaaatatcttcagataaaaactagaaagaagctttctgagaaactgtatgtgatgagtgcattcatctaacaggtttaaaactttctttagattgtgcagtttggaaaccctgtttttgtagaatctatgaagtggtatttgggagtacattgaggcctttggtgaaaaaggaaatatgttcagataaatactagaaagaagattttcagcaactgctttgtggtttgtgcattcttctcacagagttaaacgtttcttttgattgagcagtttggaaacactgttttggtagaatctaggaagggatatatcagagcacattgaggcctgggaagaaataggaaatatcctcagagaaaaattagaaagatttctgagaacctgctttgtgatgtgtgcattcatctcacagagttaaaatttcttttgattgagcatgttggcaacagtgtgtttgtagaatctcagaagggatattgagagcagttttagacctatgtttaaaaatgaaatatcttcagataaaaaataaaaagaagctttctgggaaactgctttttgatgtgtgcattcatctcacagagttaaacctttcttttgattgagcagtttggaaacactgttttggtagaatctatgaagggatatttcggagtgcacagatgcctatggtgagaaagaaaatatcttcaggtaaaaattagaaagatttctgagaaacttttgtctgatatatgtatttatctcacaaagttagacatttcttttgattgaccaggttggaaacaccattttcatccattctgtgaatgcaaatttggaagctcattgaggccgatcatggaaaagtgaatatcccaggataaaaattagaatgaagtaagttgagaaatggtattgtgatgtgtgcattcatgtctcacagttacacagttattttcattcagcagttttgaaacactttttttagaatctgcaaagggatatttgggagtgcattttggactgtgacaaaaagtaatgtatcttcagataaaatcttggaggaagctttctgataaactgctttgtgatgtgtgcattcatctctcagagttaaacctttcttttgattcagcagtttgaaaacacagtttttgtagaatatagaagggatattttggagcaaattgaggcctgtggtgaaaataatatttcttcagataaaaagtaggaggaagctatctaagaaacagctttgtgatgtgtgctttcatctcatagagttaaacttaccatttcattcaacagtttggaaacactgttttttttagaatctgcgaattgacatttgggagtgcattgaggccaatggtgaaaaataaaaaatcttcagataaaaactagaaaggagctttctgagaaattgctttgtgatatgtggattcatctcacagagttaaacttttctttgattcagcagttttgaaagcctgtttttgtccattcagtgaatcaatatttgggaatgcactgtggccaatggtgaaaaagcaaatatcccaggataaaaactagaaggaatttatctgagaaaccactttctgatgtttgcattcatcttgcagagttaaacctttcttttcattcagtagtttggaaacactgtttttgtagaatctgtgaagggatatttgggagtgcattaaggcctgtggtgaaaaagaaaatatattcagacaaaaaattgaaaagaagatttataagaaactgctttcatctcacagagttaaacctttccttagatttaaaggtgtggaatcacggtttttatgaatctgtgaagtgatatttgggaccgctttgaggcctatggtgaaaaagaaaatatcttcgtataaaaactagaaggaagcttttgagcactgctttgtgatgtgtgcattcatctcacagagttaaaccttccctttgatttagcagtttggagacagtgtttttgtccattctgagaaaggacatttggaagcttattgaggccaatggcaaaaaaagtgaatatttctgggtaaaaactagaaggaaattatctcagaaactgctctatgatgtatgcattcacctcacagagataaaccattcttttcattaagtagtttgggaacacatttttgtagaatcttccaagggatatttgagagatcatcagggccacaggcaaagaagtgaatatcccagggtaaaaactagaagaaagctatctgagaaaccacattgtaatgtgcacattcatctcacagacttaaaccattcttttgacttggcagtttggaaacactgtttttgtccattccgcaaatggacatttgggagctccttgagtccaaaggcgaaaaagggaatactccaggataaaactgacaaggaagctgtctgacaaaccgccttgtgatttgtgcattcatcttggagagttaaacatttcttttcatgcagtagtttggaaacactctttttctagaatctgcaaacagatatttgggagcgcattgagaactacggtgtaaaaggaaatatattcagtaaaaaactagaaagaagatttctgagaaattgctttttgctatgtgcattcatgtcacagagttaaagctttcttttgattgagcagtttggaatcattgtttttgttgaatctgcagtgatatatttgggaccacactgaagcctatggtgaaaaagaaaatatcttcacaggaaaaattggaaagaagctttctgagaaaccattttgtgttgcatgcattcttctcaaagagttcaaccattcttttgattgagcagtttggaaacactgcttttgtagaatatgcaaagggatatttgggggcgcattgaggccaatggtgaaaaatgaaatatcttcagataaaagctagaaagaagttttctggtaaactgctttgtgatgtgtgcattcatctcatataggtaaacctttcttttgattgagcagtttggaaacactgttttggtagaatctgtgaagggttattagggattgcattggggactgtggtgaaaaaggaaatatcttcagataaaaactagaaagaagctttctgagaaactgctttgagatgtgggcattcgtctcacaacgttaaaactttcttttgattgtgtagtttgtaaacattgtttttgtagaatctacgaagggatatttgggagcacataaaagcatatggtgaaaaaggaaatatcttcagataaaaactagacagaagctttctgagaaaccattttgtgatgtgacattcttctcatagagttaaaccattcttttggttgagtagtttggaaactgttttttttagaatctgtgaagggatatttgggagccaattgaggccaagggtgaaaaaggaaatatcttcacataaaaactagaaagaagttttctgagaaactgctttgtgatgtgtccattcatctcacagaattaaaacttccttttgaatgggcagtttggaaacacagtttttgatgtatctgtgaagggatatttgggagcgcatcaagatctatggttaaaaaggaaatatcttgggataaaaagtagaaagaagctttctcagaaactgcttcgtgatgtctgcattcttctcacagagttaaacctttcttttgattgagcagtttggaaacactgtttttgtagaatctgtgaagtgatatttgggagggcattcaggcctatggtgaaaaaggaaatatcttcagataaaaactagaaagaaacattctgagaaactgctttctgacgagggcattcatctcacacagttaaatctttcttttggatgagtagtttggaaacactgttttggtaggatctgagaagagatacttgggagcacattgaggcctatgctgaaaaaggaaatatcttcatataaaaactaaaaagaaactctctaggaaactgctttgtgatttgtgcattcatctcacagagttaaatctttcttttcattttgcagtttggcaacactgtttttattgaatctgtgaagggacaattgggagcacattgaggtctatggtcaaaaaggaaatatcttcagataaatactagaaagaagttttctcagaattggctttgtgatgtgggcattctcctgacagagttaaacttttcttttgatttagcagtttggcatcaacgtttttgtagaatctgagaaggggtgtttgggagcactttgaggcctacggttaaaaagggaacatcttcagataaaaactagaaagaagatttctgggaaactgctttatgatttctaccttcatctctcagagttaaacctttcttttgattgagcagtttggaaacactctttaggtaggatctgcaaagagatatttcagagcgagttgaggcctatggtgaaaaaggaaatatattcagaaaaaaactagaaggaagtttctcagaaaccgctttgtgttcagggcgttcttctcacagagttaacctttattttgattgagcagtctggaaacactgtttttgtagaatctacaaagggatatattgtagtgctttgtggtctacagtaaaaaaagaaatatcttcagataaaaactagaaagaaggtttctgagaaactgctctgtgaagtgtacattcttctcacacagttaaacatttccattgatcaagcagcctggaaagattgttttggtagaatctatgaagggatatatgggagtgtattgaggcctatggtgaaaaagaaaatatcttcagagaaaaactagaaagaagctttctgagaaactgctttgtgatgtgtgcattcatctcacagagtgaaacctctcttttgactgagcagtttggcaacagtgtgattgtagaatctgagaagggatgtttgggagtgcttcagggcctatggtgtaaaaggaagtatcttcagataaaaactagaaagaagctttctgggaaactgctttgtgatgtgttcattcatcccacagagataaacctttcttttgattgtgcagtttggcaacactgtttttgttgcatctgtaaaaggacacttggaagtgcattggggtctatggtgaaaaaggtaatatcttcagataaatatgaagcagtgtgggaaatctatttttatggaatctgtgaagggacatttgggagtgtattgagtcctatggtgaaaaaggaaatatcttcagataaaaactagaaagatgctttctcaaaaacagctttgtgatgggtgcattcttctcacagagttaaatctttcttttcattgagcagtttggaaacactgttttggtagactctgcgaagggatattttgtagagctttgaggcctatggtgaaaaaggagataacttcagattaaattagaaagaagctttctcagaaacagttttgtgatgtgtgcattcttctcacagagttaaatatttcctttcattaagcagtctggaaacactgttctttttttttaaatctaggaagggatatatgggagcacattgaggtcagtggtgaaaaaggaaatatcttctgagaaaaactaggcagaagcttcctgagaaactgctttgtgatgagtgcattcgtctcacagaattcatactttcttttgattgagcagtttggcaacactctttttgtagaatctgagaaggtatatttgggagtggtttgaggcctatggtgaaaaaggaaatatcttcagaggaaaactagaaagaagctttctcagtaaccaccttcagatgtgtgcattcatctcagagagttaaaccattctttgagcagtttggaaacactgttttcgtaggatgtatgaagggatatttgggagcgcttacaggcctatggtgaaaaataaatatcttcagataaaaactagaaagaagctttgtgagaaacactactttgtgatgagtaagttcatctcacagagttaaaattttcttttgatttttcagtctgacaacggtgtttttaaaaatctgagaagggatatttgggagtgctttgaggcctatggtgaagaacaatatatcttcagatataaaatagaaagaaacattctgggaatctgctttgtgatgggtgcattcttctcacagagttaaacctttcttttgattgagcagtttggaaacactgtttttttaaaatatagaaagggataaattggagcacactgaggccagtggtgaaaaaggaaatatcttcagatagaaactagaaagcagctttctgagaaaatggtttgtgatgtgtgcattcatctcatagagtttaaccatacttttcattgagaagtttgaaaacactgttttggtagaatctgcaaagggatattaaggatcgcttataggcctctggtgaaaaattaaatatcatcagataaaaactagaaagatgctttctgataaactggtttgtgacgagtgcactcatctcaaagagttaaatgtttcgtttgattgagcagtttggaaacagggactttggagaatctagaaggcatatttggaagcactttgaggcctaaggtcaaaaaagaaatatcttcagataaaaactagaaagaagctttctgggaatctgtttgtgatgtgtgcatttatgtcacagtgttaaaactgtcttttgattcagcaggatggaaagactgttttggaagaatctgcgagacacatttgggatcactttgagacatctgttgagaaaggaaatatcttcaggtaaaaactagaaagaagctttctgggaaactgctttgtgatgtgcatattcttcccacagagtaaaacctttctttgattgaacagtctggaaacactgtttttgtagagtctatgcagggatatacgggtgcacattgaggactatggtgaaaaaggaaatatcttccaagaaatactagacagaaaatttctgagaaactgctttgtgatgtgtgcattcatctcacagagttaaacctttcttttgattgaggagtttccaaaccccgttttggtactatctgtgaagggatatttgggagggcattcagacctatggtgaaaaagggaataccttcacataaatagtagaaagaagctttctcagaaaacgctttgtaatgtatgcattcttcttacagagtttaaccattcttttgagcaatttggagaccctgtgtttgtggagtctgtgaaggtatatataagagcgcattgaggcctatgatgaaaaagaaaatatcttcacagaaaaagtagaaagaagctttttgagaaacttctttgtgatgtgtgtattcttctcacagaggtaaaactttcttttcattgagcagtttggaatcactgttttggtagaatctccgaagggatatttgggagtgcattcaggcctatggtgaaaaaggaaatatcatcagagaaaaattagaaagaagctttctgagaaacccctttgtgatgtgtgcatttttctcccagagttaaacctttcttttcatttagcagtctggaagcactgtttttatagaatcttggaagggatatatgagagtgcattgaggcctatggtgaaaaaagaaatatctttagataaaaactagaaagaagctttctgagaaactgctttgtgatgagtgcattcatctcacagagttaaaacttccttttgattgaacagtttggcaacactctttttgtagaatctgagaagtgatattgggagcaattagaggcttatagtgaaaaagggaatatcttaggataaaaaatagaaaatgaattttgagaaactggtttatgatgtgtgtattcatttcacagagttaaacctttcttctcattgaggagtttggcaacactgtttttgaaagatctgtgtgggtatatttgggagcgctttgaggcctatggtgaaaaaggaaatatcttcagactaaaactagaaagaagctttctctgaaactgccttctgatgtgtgcattcatttcacagagttgaagcattcttttgattgagcagtttggaaacactgttttggtaggatctgcgaagggatatttgggagcacttacgggtctatggagaaaaataccttcagataaaaactagaaagaatctttgcgaaaaactgttgtgatatgtaagttcatctcacagagttaaacttgttattgtgcagtttggcaacagtgcttttgtaaaatctgagaaggatacttgggactgctttgatgtctatggtgaaaaacaaaatatcttcagatataaaatagaacttttctaggagaatgctttgtgatgtacacattcttctcacagggttaaacctttcttttctttgagcatatttgaaacactgttcttggagaaaatgccatgggatatatgggaacgcattgaggcctagggagaaaaaggaaatatcttcagataaaaactataaagaatctttctgagaaaccactttgtgatgtgtgcattcatctcacacttataccattcttttcattgagcagtttggaaacactgttttggtaggatctgcaaagggatatttgggagcgatttcaggcctctggtgaaaaataaaatatctctggttaaaaactagaaagaatcgttctgagaaactgatttgtgaggagtacattcaccacaaacagttaattgtttattttgattgagcagtttggcaacagtgcttttgtaggatctgtgaaggcatatttgggtgcgctttgaggccaatggtcaaaaaagaaatatcttcagataaaaattagaaagaaactttctgggaacgtttttgtgatatgtgcattcatctcacagagatcaaattttcttttgattaagcagtctggaaacactctttgtgtagcatctacccagggatatatcggaacacattgaggcctatggtgaaaaaggaaatatcttccgagaaaaactagacagaagctttctggtcaaattctttgtgatgtgtacattcatctcacagagttaaacctttttttgattgagcagtttgccaatactctttttgtaaaatctgagaagggatatttcggagggctttgagtgaaaaaggaaacgtcttgagataataagtagaaagaagctttctgggaaactgcttttgatgtattcattcttctcacagagttaaacctttcttttgattgagcaatttggaaaaactgttgttggagaaaatgcaaagggatatatgggcacgcattgaggcctatggtgaaaaatgaaatatcttcagatgaaaactataaagaagctatctgagaaaccacgttgggatgtgtgcattcatcttacagagttaaatcattcttttcattgagaagtttggaaacactgttttggtagaatctgtgaagggatatttgggagcactttcaggtgactggtgaaaaattaaataccttcagataaaaactagaaagaagctttctgagaatccaccttctgaatagtatgttcatctaaaaagttaaacatttattttgattgagctgtttggcaacagtgctttcatagaatctgcaaagacatatttgtgagtacttagaggccaatggtcaaagaataaatatcttcagataaaaactagaaagaagctttgtgggaactgttttgtgatatgtgctttaatctcacagagctaaacagtcttttgattgagcattgtggaaacgctcttttggtagaatttgcaaagacatacatgggatcacatcgaggagtatggtgagaaaggaaatatcttcagataaaaactagaaagaagttttctgggaaactgctttgtgatgtgtgcactcatcaaacagagttaaacctttcttttgcttgagcaatttggaaacactgttttggaagtatctgtgaagggatatttgagagcccattgagggctttggtgaaaaggacatatgttcagataaatacaagaaagaagctttctcagaaatggctttctgaagtgtgcattcttctcacaaaattaaaaatttcttttgattgagtagtctggaaacattgtttgcatagagtctactaagggatatataggagggcattgcggcttacggtataaaaggaaatatcttcagagaaaaactagacagaagctttctgagaaactgctttgggttgtgtccattcatctcacagagataaacctttcttttgattcagtagtttgcaaaaactcttttggtagtatctgccaagtgatattttggagcccattcaggccaatggtgaaaaaggaaatatcttcagataaaaacaagaaagacaccttctgagaaacagctgtgtgttgaggacattaatctcacacagttgaaagtttctttagatacactagtgtggaaacactgttttggcagaatctgtgaagagatatttcggagtgaattgaagcctactgtaaaaaagggaatatcttcagataaatactagaaagaagctttcgcagaaactgctttgtgatgtgtgcattcttctcacagagataaacctttattttggttgagcagtttacaaaccctgttttggttttatctgcaaagtgatatttgggaacgcatttaggccaatgctgaaaaaggaaatatcttcagagaaaaactgaaaagaagctttctgagaaactgctttgtgatgtgtgcattcaactcacagagttaaacgtttcttttgattgagcagtctggaaatgctgttttggtagaatctgcgaagggatatttgggagcacattcaggacaatggtgaaagaggaaacatcatcagagaaaaagtaaaaagaagctttctgagaaacttctttgtgaagtatgcattcttctcacagagttaaacctttcttttcattgagcagtctggaaccattgttttttttagaatctaggcagggatatatgagagcacattgaggcttgtagtgaaaaaggaagtgtcttcagataaaaactagagacaagctttctgagaaactgctttgtgctgagtgcattcatctcacagaattaaacctttctttgattgaacagtttggcaacactctttttgtagaatctgagaagggatatttgtgagcactttgaggcctatagtgaaaacgggaaggtcttcagataaaaagtagaaataagatttctgggcaaccgctttatgatgtgtgcattcatctcacagagtcaaacctttcttttgattgagcattttgccaatactctttatgtagaatctgagaagggttacttgtgagcactttgtggcctatagtgaaaaagggaacatcttcagataaaaagtagaaagaagctttctaagcaactgctttctaatgtctgcattcacctcacagagttaaactttcttttgattgaacagtttggaaacactctttttgtagactctgagaagggatatttgggagcattatgaggcctatagtgaaaaaggaaatatcttcagatgaaagctagaaataagccttctcataaaccacctttttatgtgtgctttcttctcacagagttaaagaattcttttgattgagtagtatggaaactctgttttgataggatctgcgaagggacatttgtgggcactttcaggcctatagggaaatgttaaatattttcagataaaaactagaaagaagctttgtgagaaactgctttgtgattattaagttcatctcacagaggtaaaaccttaattgtgcagtttggcaacagagctgttgtaaaatctgagaagggctatttgggaacgctttgaggcctatgttgaaaaacaaaatatcttcagatataaactagaaagaagctttctgagaatctattttgtgatgtatgcattcttctcacagagttaaacctttcttttgattgagcattttggaaacactgtttttggagaatctgccaagggatgtatgagagctcattgaggcttatagtgaaaaaggaaatatcttcagataaaaactagacagaagtgtctgttcatgtctttcgcccactttttgtggaagtcagtgtggtgattcctcagggatctagaattagaaataccatttgacccagccatcccattactgggtataaacccaaaggattataaatcatgctgctataaagacatatatacacgtatgattagagcggcactattcacaatagcaaagacttggaaccaacccaaatgtccaacaatgatagactggattaagaaaatgtggcacatatacaccatggaatactacgcagccataaaaaatgatgagttcatgtcctttgtagggacatggatgaaattggaaatcatcattctcagtaaactatcgcaggaacaaaaaaccaaacaccgcatattctcactcataggtgggaactgaacaacgagaacacatggacacaggaaggggaacatcacacactggagactgttgtggcgggggagggggaaggataacattgggagaaatacctaatgctagatgacgagatagtgggtgcagcacaacagcatggcacttgtatacatatgtaactaacctgcacattgtgcacatgtaccctaaaacttaaagtataataataataaataataaataaatgaaaataaagttatggccattacagaataagaaataaacattaaaaaaactagaaagaaaccatcaaagaaactgctttgtgatatgtacattcacctcacagtagtaaactattcttttcattaagcagtttggaaacactgttttggtagaatctgcaaagggatatttgggagcaactagagtcctatgttaaaaaaggaatgatcgtctgagaaaaagtagaaagaagctttgtgagaaactcctttataatgtgtacatacttctcacagagttaaagctttcattctattgagcagcctggaacttctttttccttagaatctaggaagggatatatggagcatattgaggccaacagtgaaaaaggaaatatcttcagagaaaaacgagaaagaagctttctgagaaactgttttgtgatgtgtgcattagtctcacagagttaaacatttattttgattgagcagtttggaaacactgttttgatagaatctgcaaagagatatttgggagcacattgagacctctggtgaaaaagaaaacatcatcagagaaaaagtagaaagaaaatttctcagaaattgctttgtgatgtgtgcattcttctcacagagttagacctttcttttcattgagtagcctggaaccactgtttttttcagaatctaagaagggatatatgacagcacattgaggcttataatggaaaaggaaatatattcagataaaaactacaatgaaattttctgagaaacttctttctgctgagtgcatttatcacacacaatgaaacctttcttttgaatgagcaatttgtcaacactctttttgtagaaaccgagaagggatatttgtgagtgctttgaggccaataatgaaaaagggaatgtcttcagataaaaactagaaagaaactttctgggaaactgctttctgatgtgtgcattctactcacagaggtaaacctttcttttgattgagcaatgtggaaacactgttgttggagaaactgcaagggatatacgggagctcattgagggctatggtgaaaaaggaaacatcttccaataaaaagtagaaagaagcattctaagaaattgcttcatgatgtgtgcattaatctcacagagttaaacgtttcttttgattgagaagtttggaaacactgttttggtaggatcagtgaagggatatttgggaccgccttgaggcctgtggtaaaaagcgaaacatcatcagagaaaaagtagaaagaagatttctgagaaactcctttgtgatgtgtgcatacatctcaaagagttataccttatatcttattgagcagtctataaactttgtttttttatggactattggttttttatttcattttactttattttattattatactttaagttttagggtacacgtgcacaaagtgcaggtttgttacatatgtatacatgtgccatcttggtgtgctgcatccattaactcgtcatttagcattaggtatatatcaaaatgctatccttccccctcctcccaccccacaacagtcaccagagtgtgatgttccctgtcctgtgtccatgtgttctcattgttcaattcccacctatgagtgagaacatgcggtgtttggttttttgtccttgtgagagtttgctgagaatgatggtttccagtttcatctgtgtccctacaaagacataaactcatcattttttatggctgcatagtattccatggtgtatatgtgccacattttcttaatccagtctatcgttgttggacatttgggttggttccaagtctttgctattgtgaatagtgccacaataaacatatgtgtgcctgtgtctttatagcagaatgatttataatcctttgggtatatacccggtaatgggatggctgggtcaaatggtatttctaattctagatccctgaggaatcgccacactgacttccacaatggttgaactagtttacagtcccaccaacagtgtaaaagtgttcctatttctctacatcctctccagcacctgttgtttcctgactttttaatgaccaccattctaactggtgtgagatggtatctcattgtggtttagatttgcatttctctgatgtacagtgatgatgagcattttttcgtgtgttttttggctgcataaatgtcttcttttgagaagtgtctggtcatatcctttgccagttttttgatggggttgtttgtttttttcttgtaaatttgtttgagttcattgtagattctggacattagcactttttcagatgagtaggttgtgaaaattatctcccattttgtaggttgcctgttcaccctgaaggtagtttcttttgataatgggagactttaacaccccactgtcaacattagacagatcagggagacagaaagttaacaaggatacccaggaattaaactcagctttgcaccaagcagacctaatagacatctatggaactctctacctcaaatcaacagaatatacatttttttcagcaccacaccacacctattacaaaattgaccacctagaaagaagtaaagcacacttcagcaaatgtaaaagaacagaaattataacaaactgtctctcagaccacagtgcaatcaaactagaactcaggattaagaaaatcactcaaaactgctcaactacatggaaactgaacaacttgctcctgaatgactactgggtacataacgaaatgaaggcagaaaaaaagatgctctttgaaaccaatgagaatgaagacacaacacatcagaatctctgggacacattcaaagcagtgtgtagagggaaatttatagcccacaagagaatgcaggaaagatccaaaattgacaccctaacctcacaattaaaagaactagaaaagcaagagcaaacacattcaaaagctagcagaaggcaagagataactaaaatcagagcagaactgaagaaaacagagacacaaaaaacccttcaaaaaaataatgaatccaggagctggttttttgaaaagttcaacaaaattgatagacaactagtaagactaataaagaagaaaagagagaagaatcaaatagatgcagtaaaaaatgataaaggggatatcaccaccgatcccacagaaatacaaattaccatcagagaatactataaacagctctatgcaaataaactagaaaatctagaagaaatgaataaattcctcaacacatacatccacccaagactaatccaggaagaagttgaatctctgaatagatcaataacaggctctgaaattaaggcaatagtcaatagcttaccaaccaaaaaaagtccaggaccagatggattcacagccgaattctaccagaggtacaaagaggagctggtaccattccttctgaaatgattccaatcaatagaaagagaagaaatcctcccaaactcattttatgaggccagcatcatcctgataccaaagcctggcagagacacaacaaaaaaagagaattttagaccaatatccttgatgaacattgatgcaaaaatcctcaataaaatactggcaaactgaacccagcaacacatcaaaaagattatccaccatgatcaagtgggcttcatccctgggatgcaaggctggttcaacatatgcaaatcaataaatgtaatccagtatataaacaaaaccaaagaaaaaaaccacatgattatctcaatagatgcagaaaaggcttttgacaaaattcagcaacgcttcatgctaaaactctcaataaattaggtattgatgggacgtatctcaaaataataagagctgtctatgacaatcccacagccaatatcatactgaatgggcaaaaactggaagtattccctttgaaaactggcacaagacagggatgctctctcaccactcctatttaacatagtgttggaagtgttggccagggcaattaggcaggagaaggaaataaagggtattcagttaggaaaagaggaagtcaaattttccctgtttgcagatgacatgattgtagatctaggaaaccccatcatctcagcccaaaatctcgttaagctgataagcaacttcagcaaagtctttgcatacaaaatcaatgtgtgaaaatcacaagcattcttattcaccaataacagacagagagccaaaccatgagtgaactcccattcactattgcttcaaagaaaataaaatacctaggaatccaacttacaagggaggtgaaggacctcttcaaggagaactacaaaccactgctcaatgaaataaaagaggataaaaagaaatggaagaatattccatgctcatgggtaggaagaatcaatatcgtgaaaatggccatactgcccaaggtaatttatagactcaatgccatccccatcaagctaccaatgactttcttcacacaattggaaaaaactactttaaagttcatatggaaccaaaaaagagccctcatcaccaagtcaatcctaagccaaaagaacaaagccagaggcatcacgctacctgacttcaaactatactacaaggctacagtaaccaaaacagcatagtactggtaccaaaacagcatagtactggtaccaaaacagagatatagatcaatggaacagaacagagccctcagaagtaatgccgcatatctacaaccatctgatctttgacaaacctgacaaaaacaagcaatggggaaaggattccagatttaataaatggtgctgggaaaactggctaaccatatgcagaaagctgaaactggatcccttccttacaccttatacacaaattaattcaagatgaattaaagacttacatgttagacctaaaaccataaaaatcctagaagaaaacctaggcaataccattcaggacatagtcatggacaaggacttcatgtctaaaacaccaaaatcaatggcaacaaaagccaaaattgacaaatgggatctagtgaaactttgttttcttggaatctaggaagagatatattggagctcattgaggccaacggtgaaaaaggaaatatcttcacataaaaactagaaggaagctttctgggaaactgctttgtgctgagtgcattaatctcacagagtgaaacctttctttttaatgagaagtttggcagcactctttttgtgcactctgagaagggatatttgggagtcctttgaggcctatagtgaaaatggaacgtcttcagataaaaaaacgaaaagctttctgggactgcattgtgaagagtaagttcatcacaaagagttaaacatttcttctgattgtgcagtttggcaaccgtgcttttgtaaaatctgagaagggttatttgggagcactttgaggcctatgttgaaaaacataatatcttcaggtataaagtagaaagacactttctgggaatctgtttcatgatgtgtgcattcttctcacacaggtaaacctttcttttgattgagcagtttggaaacactgttgttggagaatctgagaaggggtattttggagcactttgaggcctatagtgaaaaacggaacatcttcatatagaaactagaaagaatctttctgggaatctgttttgtgaagtctgcattcttctctgagaattaaaccttcctttggattgagcagtttggaagccctgttttggttgtatctgtgaagtgattcttgggagcacattcaggccgacggtgaaaaaggaaatatcttcagagaaaaatgagacaaaagtttgctgagaaacttctttgtgatgtgtgcattcatctcactgagttaaacgtttcttttgattgaggagtttgcaaacactgttttggtagaatctgctaagggatatttggaagtgcattgaggcctatggtgaaaaaggaaacatcatcagaggaaaagtagaaaaaagctttctgagaaactcctttgtgatgtgtgcattcttctcacagagttaaacctttcttttcattgagcattctggaaccactattttttttagaatctaggaagtgatatatgacagtgcattgaggcctataatgaaaaaggaaatatcttcagataaaaactagaaagaagcttcttgagaaaatgctttgtgctgagtgcactcatctcacagagctaaaagttttttctcattgagcagtttggcaacactctttttgtaggatctgagaagggatatttgtgagcactttgaggcctatagtgaacaagggaacatcttcagataaaaactagaaagaagatttctgggcaactgctttatgatgcatgcattcatctgacagaggtaaaccttttttttgattgagcagtttggaaacactgttgttggagaatctgccaagggatatatgggagctcattgagggtgacggtgaaaaaggaaatatcttctgatgaaaagaagagagaaggtttctaagaaactgcttcatgatgtgtgcattcacgtcatagagttaaacgtttcttttgattgagcagtctggaaatactgttttggtaggatctgcaaagggatgtttgggagtgtgttgaggcctatggtaaaaaaggaaacatctcagagaaaaagtagaaagaagctgtctgagaaactcctttgtgatgtgtgcatacttctcacagagttaaatcttgcatttcattgagcaatctagaacctctgtttccttagaatctaggaagggagctccatatccatatgggagcacattgaggacaaaggttaaaaaggaaatatcttcagataaaagctagaaaaaagctttccgagaaactgctttgtgctgagtgcattcatcccacagagttaaacctttcttttgatagagcagtttggcaacactttttctgtagactctgagaagggataattgggagcactttgaagcctattgtaaaaaagggaacgtcttcagataaacactagaaagaacctttctgggaaactgctttgtgatatgtgcattcttctcagagaggaaaacctttcttttgattgagcagtttgcaaaccctattttggttgtatctgcgaagtgatatttgggagctcattcagtcctaaggtgaaaaaggaaatatcttcagagaaaagttagaaagaagctttctgagaaactgctttgtgatgtgtgcattcgtctcacagagttaaaagtttcttttgattgagcagtttggaaacactgttttggtagaatctgcgaaggggtatttgggagcaccttgaggtctatggtaaaaaaggaaacatcatcagagaaaaagtagaaagaagctttttgagaaacttcttggtgatgcaggcattattctcacagagttaaaccatgcttttcattgatccgtctggaaacactgttcttttagaatctaggaaaggatatttgagagtgcattgaggcctatagtgaaaaaggaaatatcttcagttaaaaactagaaagaagctttctggaaaactgctttttgctgagtgcattcacctcacaaaatgaaacctttcttttgaatgagcagtttggcgacactctttttgtagactccaagaagggatatttgtgagcactttgaagcctctagtgaaaaagggaacatcttcagataagtaatggaaagaagttttctgggaaactgctttgtgaagagtaagttcatctcacagagttaaacctttattttgattgtggagtttgacaacagtgcttttgtaatatctgagaaggcatatttgggatcactttgaggcctatattgaaaaacttagtatcttcaggtataaagaataaagaagctttctgggaatctgcttcatgatgtgtgcattcttctcacacagttaaaccttttgtttgattgagcagtttggaaacactgttggataatctgccaaggtctatggtgaaaaaggaaatatcttcaaatcaaaactaaaaagaagatttctgagaaacttctttgtgatgtgtgcattcttgtcccagagttaaacttttcttttcattcagcagtctggaaacactgtctttttagaatctaagaacggatatatgagagtgcactgaggcctgtagtgaaaaaggaaatacctttagataaaagctagaaagacactttctgagaaactgcatggcactgagtgcattcatctcacacagttaaaactttcttgtgattgagtagtttgtcaacacagtttttttagatgctgtgaagggatatttggaagtgctttgaggcctatggtgaaaaaggaaatatcttcagatgaaaactagaaagaagccttttcagaaaccacctctggatgtgtgcattcatctcacagagttaaagcattcttttgattgagcagtttggaaacactgttttggtaggatctgcaaagggatattttggagcacttacagacctatagtgaaaagtcaaatatcttcagataaaaactagaaagaaggtttgtgagaaactgctttgtgatgagtaagttcatctcacagaggtaaacttttcctttgattgtgaagtttggcaactgtactttggtaaaatctgagatgggaaactgggagcactttgaggccagtgttgaaaaacaaaatatctttatatataaactagaaagctttctgggaatctgctttgtgatatattcgttcttctcacagagttaaaccttcctgttgattgattgagcagtttggaaacgctattgttggaggatctgccaaggaatatatgggagctcattgaggcctatggtgaaaaaggaaatatcttcagttaaaaaataggaagaagctttctaagaaaccgctttgtgacgtgtgcattcacctcatagagttaaaccattcttttcattgagcagtttggaagtacttttttggtagaatctgtgaagggatatttgggagtgctttgaggcctatactaaaaaaagaaacattatcagagaaaagttagaaagaagctttctgagaaacttctttgtgatgtatgcattcttctcacagagttaaaactttcttttccttgagaagtctggaaccactgtttttttagaatcaaggaagggatatatgagagctctttgtggcctatagtgaaaaaggaaatattttcagataaaaactagaaagaagttttctgagaagctgctttgtggtgaatgcattcatctcacagaattaagcctttcttttgattgagcagtttggcaacactctttttgtagaatctgagaagggatattagggagtgctatgaggcttatagtgaaaaaaacaacatcttcagataaaaactagaaagaacttttctggacaactgctttatgatgtgtgtattcaaatcatagtgttaaaactttcttttgattgagcagtttgccaatactctttatgtagaatctgagaaagaatattttggggtgatttcaggcctatagtgaaaaagagaacatcttcagataaaaattagaaagaagctttctgagcaactactttctgatatgaccattcatctcagagaggtaaacctttctttgattgagcagtttggtaacacagtttttgtagattctgtgaagggatatttgggagcactttgaggcctgtggtgaaaaggaaatatcttcatatgaaaactagaaagaagctttctctgaaactgccttctgatgtgtccattcatctcatagagttaaaacattcttttaattgagcagttgggacacactgttctggtaggatctgcgaaggaatatttgggagcacatacaggcttataatgaaaagttatatgtctgcaaataaatactagaaagaagctttgtgagataatgctttgtaatgagtaagttcttctcacacagttaaatctttcttttgatagtgcagtatggcaacatggcttttgtaaaatctcagaaaggatattttggagtgctttgaggcttgtgttgaaaaacaaaattatcttcaggtacaaactaggaagaagctttctggtaatctgctttgtgatgtgtgcattcttctcaaagagttaaacttatcctttagttgagcactttggaaatactgttgttggaaaatttgccaagggatatatgggagctcattgaggcctatgttgaaaatggaagtatcttcagacaaaaaccagaaggaagctttctaagaaactgttttgtgatgtatgcattcagcttacagagttaaaccattcttttcattgagcagtttgaaaacactgttttcgtagaatctgcaatgggatatttgagagttccttgaggcttatgttaaaaaaaggaaagattatcaaaaaaaaaaaagtagaaagaagctttctgagaaactccttcatgatgtgtgcatacttctcacagagttaaacctttcatttcattgaacagtctggaacctctgtttctttagcatctaggatgggatatatacaagtacttcgaggtcaatggtgaaaaaggaaatatcttcaaataaaaactagaaagaagctttctgacaaactactttgtgctgattacattcatctctcagtgttaaacctttcttttgattgtgcagtttggcaacagctctgttgtaaaatcagagaagggatatttgggagtgctttgaggccaatgttgaaaaacaaaatatcttcagatataaactagaaagaagctttctgggaatatgctttgtgattgtgcattcttctcacagagttaaaccgttcttttaattgagcagtttggaaatgctgttgttggagaatctgcctagggatgtatgggagctcattgaggctcctggtgaaaaaggaaataacttcagataaaaactagaaagaagttttctaagaaacagccttgtgatgtgtgcattcaccttacagagttaaaccattcttttcattgagcagtttagaaacaatgttttagtggaatctgcaaagggatattttggagcgccttgaggtgtatggtaaaaaaggaaacaacatctgagaaaaagcagaaagaaactttctgagaaactcccttgtgatgtgtgcatgtttctcacagagttaaacatttcatttcattgagcagtctggaaactctgctttttcagagactagcaagggatatatggtagcacattgaggtcaatggtgaaaaaggaaatatcttcagataaaaactagaaagaagcattctgagggactgctttgttctgagtgcattcatctcatagagtgaaacctttctttgattgatcagtttggccaccctctttttgtacatcttgagaagggatatttgggagcactttgagacctttagtgaaaaagggaatgtctccagataaacactagaaagaaactttctgggaaactgctttgtgatgtatgcattcttttcacagaggtaaacctttcttttgattgagcaatttgcaaaccctgttttggttgtatctgtgaagtgatatttgggagtacattcaggcctatggtgaaaaaggaattaccttcagagaaaaacaagaaaaaagctttctgagatactgctttgtgatgtgtgcattcatctcagaggtaaacgtttcttttgattgagcagtttggaaacatagtttttgtagaatctgtgaaggggtacttgggagtgccttgaggcctatggtgaaaaaggaaacatcatgagagaaaaagtagaaaggagcattctcagaaacttctttgagatgtgtgcatccttctcacagagttaaagttttcttttcattgagcagtctgaaaacactttttttttagaatctaggaagggatatatgagagctcaatgaggcctgtagtcaaacaggaaatatcttcagaaataaaactagaaagaagctttctgagtaactgctttgtgatgagtgcattcatctcacagagttaaaatttcctttgattgagtaatttggcaacattctttttgtagaatgtgagaagggatatttgggagtgctttgtggcctatagtgaaaaagggaacgtcttcagataaatagtagaaagaagctttctgggcaactgctttatgacgtgagcattcctctcacagtgttaaacgtttcttttgattgagcagttaacccatactctgtgtgtagaatctgagaagggttatttgggagttatttgaggcctatagtgaaaaagggaacatcttcagataaaaagtagaaaggagctttctggacaactgctttctgatgtgtgcattcatcccacagagttaaacctttcttttgatttagcagtttgcacactcggttttttttagattatgtgaagggatatttgggagtgctgtgaggtctatggtgagaaaggaaatatcttcagatgaaaactagaaagaagccttctcatacacagccttctgatatgtaccttcatctcacagagttaaagcattcttttgattaagctatttggaaaaactgttttgttaggatctgtgaagggatatttgggagcacttacaggcctattgtgaaaaagttaaatatcttcagataaaaactagtaagaagctttgtgagaaactgatttgtaatgagcaagttcatctcacagaattaaacgtttcttgtgattttgcaatttgtccagagtgattttgtaaaatctgagaagggatatttgggagcgctttgctgtctatgtggaaaaacaaaatatcttcagatataaattagaaagaagcttcccagaatctgctgtgtgatgtgggcattcttctcacagagtttaactgttctttcaattgagcagtttggaaacattgttgttgggaaatctgccaatggatatatgggagctcattgaggcctatgatgaaaaaggaaatatcttcagataaaaactagaaagaagcttcataagaaactgctttgtgatgtgtgcattcacctcacagagttaagccattattttcatggagcagtttggaaacatcgttttggtagaatctgtgaagggatatttgggaatgccttgaggcctatggtaaaaaagcaaacatcatcagagaaaaggtcgaaagagtctttctgagaaactcctttgtgaagtgtgcatatttctcacagacttaaacctttcatttcattgagcagcctggaacctctgtttttgcagaatcaaggaaggtatatatgagagcacattgaggccaatggtgaaaaggaaatatcttcagataaaaactacaaagaaggtttctgagaaagtgctttgtgctcagtgcattcatctcacagagttaaacctttcttttgatttagcagtttggaaacactctttttgtagattctgtgaagggatatttgggagcactttgaggcctatggtgaaaaaggaaatatcttcagatgaaaactagaaagaagcattcctgtaaaccaccttctgatgtgtgcattcatctcacagagttaaagtattcttttgattgagctattttgaaacactgttttggtaggatctgagaaatgttatttgggagtgcttacaggcctattgtgaaaagttaaatatcttcacataaaaactagaaagaagctttgtgagaaactactttgtgatgagcaagttcatctcacagagctaaacctttcttgtgattgtgcactttggcaaccttgctttagtaaaatctgagaaggaatatttgggagtgctttgaggtctatgttgaaaaacaaaataccttcagttataaactagaatgaagctttttcgaaatctgctttgtgatgtatgcattcttatcacagaggtaaaccattattttaattgagcagtttggaaacactgttgttgtagaatctgccaacggatgtatgggagctcattgaggcctaaggtaaaaaaggaaatatggttagataaaaactagaaagaagctttctaagaaaccactttgggatgtgtgcattcacctcacagaactaaaccattaatttcattgagcactttggaaacactgtttttgtagaatctgtcaacagatatttgggagtgcactgatgcctatggtgaaaaagggaatatcttcagattaatactagaaacaagctttctcagaaactgcttcatgaagtgtgccttcttctcacagagttaaactgttcttttgattgagcagtttggaagcactgtttttgtagaatctgtgaaggggtatacaggaacacattgaggcctatggtgaaaaaggaaatgtcttcagagaaaaactagaaagaaggtttctgagaaccagctttgtgatttgtgcattcatctcacagagttcaacgtttcatttcattcagcagtctggaagcatacttttggtagaatctgctaaggtacataaggagtgctttgaggcctatggtgaaaaaggaaatatcgtcaaagaaaaagtagagagaggctttctgagaaactcctttgtgatgtgcccattcatctcacagaggtaaacttttattttgattgatcagtctggatacactgtttttgtagaatctaggaaaggatttatgggagtacattggggcctatggtgaaaaagacaatatcttcagataaaaactagaaagaagctttctccaaaactgctttgtgacgtgggcattcttctcactgagttaagcatttcctttgattgaacagtctggaaacactgtttttctaaaatctatgaagtgatatgtgggagcaatttgaggcctattgtgaaaaaagaaatatcctcagagaaaaactagaaagaagacttctgagaaactgctttgtgatgggtgcattaatctcaaggagttaaacctttcttttgattgagcagtctggcaaaagtatttttgtagaatccgagaagggatatttaggagtgctttgagacctatggtgaaaaaggaagtatcttcagataaaaaccagaaagaagctttctgtgtaactgctttgtgatgtgtgcattcatctcacagagttaagcctttcttttgattgagcagtttggcaacatagtttttgttgaatcatgaagggacatttgggagcacattgaggtctttggtgaaaaccgaaataccttcatataaacaggagaaagaagctttctcagatgccggtttgtgatgtgtgcaatcttctcactgagttaaacctttcctttgattgagcagtttggaaacactgtttctgtagaatctgtgaagggacacttgggagcacatagaggcctatggtgaataacaaaataaccccagataaaaactagaaataaggtatctgtagaactgcattgtgatgtgtggattcacctcacacagttaaacatttcttttgatttggcatgttaaaaacactcttttctaagatctgtgaagggaagtcttggagcccattgaagtaaacgatgtggagtaaacgaatattccctgataaaaactgaaaagaagctatccgtgaaactactttgagatgtatggattcttctcacagttttaaaatttcttttgatgcagttggttggaaacacttttttggtagaatctgcaaagggacatttgcaaatccatggaggacaatggtgaaaaacagaatatcccaacataaaaactagaaactgttaatgaaactgcttggtgatgagtggattcacctcacagaggttaacctttcttttgattcagcaggttggaaacactctttctgtagaacctgcaaagggacatttgggagtccactgaggtctactttgaaaaactgaatatcgccagataaaactagaaataggttatctgtgaaactgtttgtgatgtgtggaatcatctcccaaagttaaacatttcttttgattcagcagcttggaaacactctatttgtagaagctgcgaagggacatttgagagcccgctgaggcctatggtaaataattgaatatcctgaggtaaaaactagaaagatgctatctgtgaaactgctttgtgatacgcagactcatctcaaaaagttaaacctttcttctgattcatcaggttacaaacactttttttgtaaattcagtgaagggatatttagaaatcctttgaggtctgcagtaataaaccaagtaattccagaaaaaaacaagagagaagctgtctgtaaaactgcgtttgtgatgtgtgtattcatctcacagagttactcctttctttttatactgtagcattgaaatagtctttagatagaatctgcgaatggacattttggagcccttagaggcctatgatgaaaacccaaatatatccagataaaaacttcaaagaagctatctgtgaaacttcgttgtgatgtgaggattcatttcacagagctaatcctttctttttattcagtaggttgtaaacattattttggtagaatctgtgaagggacacttgggagcccatgctgagaaatggaatatcctcagataaaaaccagaaaaaaatctacttgaaaatgctttatggttttaggtctaacatttaagtctaatccatcttgaattaatttttgtataaggtgtaaggaaggaatccagtttcagctttctacacatggctagccagtttcacagcaccatttattaaatagggaatcctttccccatttcttgtttttgtcaggtttgtcaaagatcagatagttgtagctatgtggcattatttctgagggctctgttctgttccattggtgtatatcactgttttggtaccagcaagatgctgttttggttactggagccttgtagtatagtttgaagtcaggtagcatgatgcctccagctttgttcattagacttaggattgacttggctatgcggacttttttttttgttccatatgaactttaaagtagtttttcccaattgtgtgaagaaagtcgttggtagcttgatggggatggcattgaatctatcaattaccttgggcagtatggccattttcatgatattgattcttcctacctatgagcatggaatgttcttccatttctttgtatcctcttttatttcattgagcagtggtttgtagttctccttgaagagatccttcacatctcttgtaagttggattcctaggtattttattctctttacagcaattgtgaatgggatttcactcatgatttggctctctgtttgtttgttattggtgtataagaatgcttgtgatttttgcacattgattttgtatcctgagactttgctgaagttgcttatcagcttaaggagattttgggctgagatgatggagtgttcttgatatgctatcatgtcatctgcaaacaaggacaattttatttcctcttttcctaattgaataccctttatttctttctcctgactgactgccctggccagaacttccaacactatgttggataggagtggtgagagagggcatccctgtcttatgtcagttttcaaagggaatgcttccagtttttgcccattcagtatgatattggctgtgggtttgtcaaagatagctcttattattttgagatacgtcccatcaatacctaatttattgagagttttagcatgaagtgttgttgaattttgtccaaggccttttctgcatctattgagataatcatgtggtttttgtctttggttctgtttacatgctagattacatttattgattcacgtatgttgaaccagccgtgcatcccagggatgaagcccacttgatcatggtggataagtttttgatgtgttgctggattcggtttgccagtatttcattgaagatttttgcattgatattttttgcattgaccaatcttgcattgatgggatattggtctaaaattctcttttttgtcatgtttctgccaggctttggtatcaggatgatgctgacttcataaaatgagatggaaaggattccttcttttttactgattggaatagtttcagaaggaatggtaccagctcctctttgtacctctggtagaattcggctgtgaatccatctggtcctggaccttttttctttggtaaactattaattattgcctcaatttcagagcccgttattggtgtattcagagattcaacttcttcctggtttagtcttgggagggtgtatatgtcaagggatttatccatttcttctagattttgtagtttttttgtgtagaggtgtttatagtattctttgatggtagtttgtattactgtgggattggtggtcatatcccctttatcactttttattgcatctatttgattcttctctcttttcttctttattagtcttgctagtgttctatcaattttgttgatcttttcaaaaaccagctcctggattcattgattttttgaaggtttatttgtgtctctatttccttcagttctactctgatcttagttatttcctgccttctgctagcttttgaatatgtttgctcttgcttctatagttcttttaattctgatgtcagggtgtcaattttagatctttcctgctttctcttgtgggcatttattgctataaatttccctctactgactgctttgaatgtgtcccagagaatctggtatgttgtgtctttgttctcattggtttctaagaacatttttatgtctgccttcatttcgttatgtacccagtagtcattcaggagcaggttgttcagtttccatgtagttgagtggttttgagtgagtttcttaaccctgagttccagtttgattgcactgtgatctgagagacagtttgttataatttctgttcttttacatttgcttattagtgctttacttccaactacatggtcaattttggaataggtgtggtgtgttgctgaaaagaatgtatattctgttgatttggggttggagagttctgtagatgtctattaggtcctcttggtgcagagctgagttaagttcctggatatccttgttaactttctgtctcattgatctgtctaatgttgacagtggggtgttaaagtctcccattattattgtgttggattctaagtctctttgtaggtctctaagtactagctttatgaatctggatgctcctgtattgggtgcatgtatatttaggatagttagctcttcttgttgaattgatctctttaccattacgtgatgtccctctttgtctcttttgatctttgttggtttaaagtctgttttatcagagactaggattgcaacccctgcctttttttgttttccatttgcttggtagatcttcctccaaccctttattttgagactatgcgtgtctctgcataaaaaccgaagaagaaaacctaggcattaccattcaggatgtagccatgagtaaggacttcatgtctaaaacaccaaaagcagtgtcaacaaaagccaaaattgacaaatgggatctaattaaaaataaagagcttctgcacagccaaagaaactaccatgagagtgaacaggcaacctacagaatgggagaaaatttttgcaatctactcatctgacaaagtactaatatccagaatctacaatgaactgaaacaaatttactagaaaaatcaaacaaccccgccaaaaagtgggcgaaaggtataaacagacccttctcaaaagaagatgttaaagcagccaagagacacatgaaaaaatgctcatcatccctggccatcagagaaatacaaatctaaaccactatgacgtaccacctcacaccagtcagaatggcaatcattaaaatgtcaggacacaacaggtgctggagaggatgtggagaaataggaaaacttttacactgtttttgggactgtaaactagttcaaccattgtggaagtcagtgtggcaattcctcagggatctagaactagaaataccatttgacccagccatcccattactgggtatatatccaaaggattaaaaatcacacagctataatgaaacatacacaggtatgtttattgtgcattattcacgataggaaagacttggaaccaacccaaaagtctaacaatggtagactggattaagaaaatgtgtcacatatacaccatggaatagtatacagccataaaaatggtgagtttatgtcctttgtagggacatagatgaagctggaaaccatcattctcagcaaactatcacaaggacaaaaaaccaagcactgcatgttctcactcataagtgagaattgaacaatgagaacacatggacaaaggaaggggaacatcacacaccagggtttgttgtggggttgggggagggtggtgggatagcattagtagatttacctaatgttaaataacaagtaaattagtgcagcacaccaacatggcacatgtatacatatgtagctggcaccttgtgcacatgtaccctgaaacttaaagcataataaaagaaaagcaatttgagtaactaaaattctgaaaaattaaaaaaaatattctgtgatgtgtggattcatctcacagagaaaaacctttcttttgattctgcaggttggaaaagttctttggatagaattatagagggaaaattgggagcacatagaggcctgtggtgaaaaactgaatatccccagataaaaactagaaagaagctatatgtgaaggttctttttgatgtgtggaatcatctcttaaagttaaacctgcctttttgattcaggagtttgcaaatacttcttttgcagaatctgcgaagggacatttgagagccctttgaggctcatggtgagaaaccgaatatcaacagataaaaactagaaggaagctatctgtaaaactgcttcataatgtgtggattcatctcacagagttaaacatacattttcattctggaagttggaaggtgctttaggtgcaatctgcaaagggacatttgggagcccattgatgctgatgatttaaaacaaaatattccaagataaaaactagaaaaaactatctttgaaacggcattgggatgcgtggattcatctcacagagttaaatttctcttttgattcagcaggctggatagacttttttcgtataatctgtgtagggacatttgggagccatttcacacctgtcatgaaaaaccaaatatccccagataaaactagacagaaactatctatgaaactggattgcgatgtgtggattcacatcattgatataaacctttattttgattctacagattgcaaaactctttcagaagaatctgcaaagggacatttggaagcccatagaagccaattgtgaaaaagcaaatagtcccagatgaaaactagaagaagctatatttgaaactgcattgtgatgtggcgattcatctcacagagttaaacctttctttgggttcagcaggtttgaaacactcttttggtagaatctgtaaagggatacttgggagactatagaggcctattttgaaaagccaggtatctccagataaaaactagaaggaagctacctgtgaaactgttttgtgatgtgtgtattcatcttatctcacagagttaaaactttcttttgattcagtaggtggtaaacactcttttggtagaatctgcaaagtgacatatcacaacccattgatgcctatggtgaaaaaacggatatccccatataaaaactagaaagaaggtatttctgaaactgcattgtgatttgtgcatttatctcacggagttaaatatttctattgattcagcataatggaagcaatctttttgtagaatctgcaaagggacatttgggagcccttttactgctatggtgaaaaatcgaatatccccagacaaaaacaagaagcaagctatctgtgaaactgctttgtgatgagtggattcatctcacaggttttaaccttttgttttactcagtgagttgaaaacactctttttttttagaatctaccaagggacacatgggaacccacaaaggcctatggtggaaaagtgaatatccccagataaaaactaggaacaagctgtctgtgaaactacattgtgatgtgtggtttacttcccacagttaaacatttcttttgattcagcaggttgcaaacactgttttaatagaatctgtgaaggtacatttgggagactattcaggcctatggtgaaaaaccaaatacattcagaaaaaaacctgaaagaagctatctgtgacactgctttttgatgtgtggattcatctcacagagttaaacacttctttagatacagcagtgttgaaatattctttaaatagaatctgccaagagacgtttttaagcccatataggcctaagttgaaaaacagaatatcaccagataaaaactagaaacaagctattggggacatttctttgtgacatgtggattcccccacagagttaaaacttttttgacttagcactttataaacactcttttcttgaaactgtgaagggaaatttgtgagcccattttagcctatggtgaaaaatggaatatcccaagataaaaaccagaaagacgctatcagtgaaactgttttggatgtttcgattcacctcacagacttaaaccttcttttgattaagcaggttggaaacactcttttggtaaaatctgcagagggacatttgggagccctttaaggtcaatagtgaaaaattgaatatcaccagattataactagaaagaagccatctgtaaaactgctttgttatgtgtggattcatctcactgactgaaaactttctgtcaattcagcaggtttgaaataatctttttgtagaagccatgaaaggacatttgggagccctttgtgaataaccaaatatccccagataaaaaaataggaggaaattatctgtgaaattgctttcagatgtgtgggttcatctcagagttacatttttcttttccttcaacaggtgtgaaactatttttggtagaacctgtgaagggatatttgggatcccataggaaaaacaatatctgcagataaaaactagaatcaagccctctgtgaaactattttgtgatatgtagattcgtttcacagatttaaacctattttttgattcagcaggtgggaaacactctttgggtaggatctgtgaagggatattttggagacctttgaggcctatggtgaaaaaccaaaattccctagatacaaactagaaagaagatctcatgaaagagcattgtgatgtgtggattcatctcacagagttaaaatttttttttgattcagtagttttgaaacactgttttggtagattctgtgaagggacattttgaagccctttgaggcatatggtaaaaaccatgatttccccagatatatcaagaagaagctaactgtgaaagtgctctgtgatgtgtggattcaccttagacttaaacctttcttttgattcggcatgttggaaacattcttttggtagaaactgcaaagacatatttgggagcccattgaggcctgtaatgaaaaacaacatacccaaagataaaaactacaaagaagatatctgtgaaactgctctgtgatgtatggatttatctcacagaattaaacctttcttttgattcagctgttggaaacactcttttgctagaatctgagaaaggacatttgccagcacactgaaccctatgttaaaaaaccgaatatcccaagataaaaattagatagaagctatcaataaaatgtatttttgatgtgtagattcattccacagaggtaaacttttctttttcatttagcaggttgcaaacactccttttgtataatatactaagggatatttggaggcccattgaggtctatggagaaaacagaatatcaccagacatctgtgaactgctttgtgaggtctggattcatctcaaagaggtaaaacgttcctgaaagcagcgtgtgggaaacactcttttggtagaaactgcaaagtcctttgaggtctatggtgaaaaactgaacgtccacaaataaatattagaaaggagctgtcagtgaaattgctttgtgatgtgtggattcgtcccactgatttaaatctttcttttgatacagcaggattgaaacagtctttagttagaatctgtgaagggacatttgaaagcccatagaagccaatgttgaaaaactgaacatccaaagataaaaactagaaataagctatctgtgagcttgctttgttatgtgtggaatcatctcagagatttaaacctctcttttgattcagcaggttgcaaacattcctttgctagtatctgagaaaggacaattgaaagcccattgtagcactttgtgaaaaattgaatattcaaagataaaagctagaaagaagcttttagtgaaactacttagtgatgagtggattctactcagagagtgaaacttttctattgttcagcagtttggaaactctcttttcgtaaaactgggaaacggacatgtgggagcccattgagacctatggtgaaaaatcatatatttccagagaaaaacaagaaaaaagctatctgtgaaactgctctgtgttgtgtggattcatctcacagagttaaaactttattttgattaaggaggttggaaaaacttgtttggcagaatctgcgaaggaagctttggaagctttttgaggcctatggtgaaaaacagaatatccacagataaaaactacaaagtagctatctgtaaaactgctttgtgacttgtagcttcatctcacagaggtaagcctttcatttgatttagcacgttgaaaaccctcgttttgtagaacctgagaagggatactttgaagcccattgactcctatggtgaaaaaagaaatatccctagttcaaaactagaaggaagctacctgtgaaactgatttgtgttgcatggattcaccacttatagttaaacttttcttttgatccagcaaatctgaaacactctttagggagaataagtgtagggtcatttgggagaatgtagaggcctatggtgaaaaagagtatatcgccagataaaaactaaaaagaaagtgtctgtgaactgctgtgtgatgtgtggattcacatcacagaattaaacttttgttttgattcagcaggtgtgaaaccctcttttggtgggatctgcaaagggacatttggaagcccaaagatgtttatggtgaagaaccgaatatatctagataaaaactagaaagaaactactcgtgaaactgccttgtgatgtgtggattcgtttcacagagttaaatatgtcttttggttcagtaaattttaaacactcttggggtagaaccttttaagggacatttcagagtccttagaggcctatggtaaaaaaacaaatatccccaggtaaaaactagaaagaagctatctgttaaactgctttgtgatgtctgtattcaaatcacaaagttaagcctttctttggattcagcatgtcacaaacactctttttatagaatctgtgaaggtacatttgggaacactttcaggaatatagtgaaaaacagaatacccccagatactaaccagaaagaagctctttctgaaactgcttttttgatgtgtggattcatctcacagggttaaaccttccttagattcagcaggttggaaacgctcgttttttagaatctgcgtggggcattttgaagccatttgaggcctatgattaaaaaaaaaagacactatatccccagataaaaactaggaatcagctatcggtgaacttctttgtgacatgcagagtcatctaacagaggtaaacgtttcttttgaaacagcgtgctggaaacattgtttttgcagaaactgcaaagacaaatttggaagcttttagaggcctatggtgaaaaacagaatgttcatagataaaaactataaagaagctatctgcaaaacaaccctgcgatctgtggattcatctcacagagataaacccgtctattgaatcagcaagttgcaaacactctttttgtataatctgcaaagaaacttttggagtccatggaggcctatagtgaaaaacggagtatccccagataaacactagaaaaaagctatctttgaaactgctttgtaatgtgtggattcatctcacagaattaaaccttttcttttattatccaggtttgaaactctcttttggtagaatttgtgaaggaaggtttgggaagccatagaggcctatggtgaaaaacagaatatccccagataaaaactagaaaaagctgcctgtgaaactgcttcatgatatgtggattcatctcaaagggttaaacttgtttttgattcactagattagaaacactctttttctggaatctccgaaggcacattttgcaggccactgtagtctatggtaacaaacagaatatcccaagctcaaaactagaaagaggctatctgtgaaacttctttgtgatgtgtggattcatcccagagaagtgaacctttcttttaattcagcaggttgcaagcacacttttgcagagtctgaagagacttttgaaagctgtttgagtcctttggtgagaaacaaaatgtccacagataatcacagggataaaactatctgttaaactactttttgatatgtggtttcatctcacagtgttgaacctttcgttttactcagcaggttggaaacactctttggttagaagttatgaggaaacatttgggagctttttgaggcctattctgagaaactaaacatccccagataaaaactagaaaaaagctatctttgaaactgctttgtgatgtgtgtattcatcttacagagctaaatttttattttgacacagcaggtttgaaactctctttaggtagaatctgcaaaggtatatttgggagtgccttgaggcttacagtgaaaaataaaatatccccagataaaaactagaaagaaactatctgtgaaacttctttgtaatgtgtggattcacctcacagagttaaacctgtcttttcattcagcaggttggaaaccctctttttggagatcctgccaaaggacgtttgtgagccctcagaggcctgtggtgaaaaacagaatatccaatgataaaaactagagaaaacgtatcaatgaaactgccttgtgatatgtggattcatctcacagagctaaacatttcttttgattcagtatcttggaaacacttgttgtgtagaattggtggaaagacatttgggagccaatagaggcctaaggtgaaaaactgaatatccccagataaaaactagaaagaaactatctgtgtaactgctttcataagtgtggattcctctcacagagttaaacctttcttttagattcagcaggttgcaaatacttatgttttgtaatctgtgtagtgacatttgggagcccattaaagcctatgatgaaaaatcaaatatccccagataaaaaccaaaaagaagctatctttgaaactgtttagtgatgtgtgggttcatctcaaagtcttaaatctttcttttgactcagcgtgttggaaacactcttttgctagaatctgcaaaagatttttgagcccactgtagtctagggtaaaaaaaccccacaaatattgcagaataaaaactagaaagaagctatcagtgaatctgctttgtgatgcatggattcatttcacagaattaaacctttattttgatacttcaggttggaaacacttttttgtagaatctgtgaagggacatttgagagagatttgaggcctataatgaaaaactgaaaatccccagataaaacctagaaggaatctctttgtgaaactgtttgggatgtgtttattcagctaatagagttaaaattttctgccaatataacatgtttgaaacaatatttagatagtatctgtgaagggacatttaagagcccataaaggcctatggtgaaaaaaagaatatcgccagatataaagtagaagaaagctaaagatgtaactcctttgagatgtatggattcatgtcacatagttaaaactttcttttgtcacagcaggtatgaaaccctctttagttatcatctgtgaagggactttcaagagcccatagaggcctatggcaaaaaactcaaaaactccagataaaaactagaaggaagctctgtttaacttgtttgtaatgtctggatttatctcacagagatacaattttatattgattcagaaagttggaatcactcttttggtagaatctgccaagggacatttgggatcccttaaaggcctatggtgaaaaactgaatacaccttgataaaaactaggaagaagctatctgtgaaattgcattgtaaagtgtggattcatgtcacagagttaaacatttgttttgattcatcaggttggaatcactgattttgcagattctgtgaagagacattgtagagcctattgagtcctatggtgagcaacccaatatttccagataaaaaccagaaggaagctatttgtgaaactgttttgtgaggtgcgattcatctcacagatgtaaacactttttttgattcagtaggttggagatactcattttgtagaattggcaatgggatatttcagggcccattgaggcctaagcttgcaaacccaatatcccgagataaaaactaaaaaggagctgtcagtgaaactgctttgtgatgttgggatttattttacagaattaaacacttcttttgacttagcaggttgtaaacactcttttcgtagaatctgcatagagacatatcacagcccattgaggcctatggtgaaaaaacagatatccccagataaaaactagaaagaggcatttctgaaactgcattgtgatgtctgcatttatctcacagaggcaaatctttgtattgattcagcaggatggaaaaactctttttgaataatctgcaaagggatatttgggagatcttttaggcctgtggtgaaaaataaatatccccagataaatactgcaaagaactgaagagtgacacagcttttctgatgtgtggatttatctcacagacttaaacctttcctttcattctgcaggtttgaaacactcattttgcagaatctgtgaagggacattatagagccccttgaggtctattgtgaaaaataaaatatcctcagataaaaactagaaagaagctgtctgtgaagtgctctgtgatgtgtggattcattgcacagagttgaaactttcttttgatgcgccaggatggaaacactctttagatattatctgcaaaggaacatgtattagcccatacaggcctagggtgaaaaaacgaatatccccacataaaaactatcaagaagctatctgtgaaactgctttgttaagtgtagattcagctcaaagggttaaacctttctttggattcagcaggttgcaaacactcttttgctagaacctgccaagggacatttgtgagcccattgttgctcactgtgagaaatggaatattcaaagacaaaaactagaaagaagctttctgagaaactgctttgtgatgtgtgcattcttctcacagacttaaacctttcatttgattgagcaattttggaaacactgtttttgctgaatctacacagggatatatgggattgcattgaggcctatggtgaaaagagaaatatcttcagataaaaaatagaaagaagctttctgggaaactgctttgtgatgtgtgcattcaccacccagagttaaacttttttttgattgagcagtttggatacactgtttttgtaaaatctgtgaagggacatctgggagtgcttggaggcctatggtgaaaaagtaaatgtctttagacaaaaagtagaaagactctttctcaaaaaccgcttagtgatgtgtggactcttctaacagtgttaaactgttcttttgtttgaacagtttggatacactgttttggtagaatctgtgaagggatatttgggagtgcattgtggccttttgtgaaaaagaaatatcttcagggaaaaactagaaagaagctttcagagaaactgttttgtgatgagtgcattcagctcacaaacttaaaactttcttttgattgagcactttgcaaacactgcttttgtagaatgttcgaagggatatttgggagccattagaggcctatattgaaaaaggaaatatgtttgagaaaaactggaaagaagtttctgcataactgctttgagaagtgtgcattcatctcacagagttaaacttatagtttgagaagattggaaacactgttttggtagaatctgtgaacagattttttggagtgctttcagacctatgatagaaaaggaattatcttcagataaaaactagaaggaaacattctgagagatggctttgtgatgagcacgtttatctcacagagttaaacctttattttgattgagcagtttggcaactgtgttttgtaggcactgagaagggctaattaggagtggttttaggcctatggtgaaaaccgaaatattgtcagttagaaacaagtgagaagatttctgggcaacttctttgtgatgtgtgcattcatctcacagagttaatcctttcttttgattgagcagtgtggaaacactgtttcagtagaatctatgaagagatatttgagtgcactgagtgctatggttcaaaaagaaatatattcagctaaaacttaaaaggtttctcagaaactgctttgtgatgtgtgcatttttctcacaaagttaaacatttcttttgattgagttgtctggaaacattgtttttgtagaatatacaaaaggatatatgtgagagctttgaggcctatggtgaaaaaggaaatattttcagttaaaaactagaaagaagctttctgagaaactgctttatgatgattgcattcatctcacagataaacctttcttttgattgaccagtttggaaacactgtttttgtagattctgtgaagggacattctggagcacattgaggcctatggtgaaaaaggaaaaatcttcagataaaaactagaaagaagctttcttaggaaccactttttgttgtgttcattcttctcacagagttaaaactttcttttgattgaatagtatggaaacactgttttcgtagaatctacaaagggatatatgggagcccattgacacctatgatcaaaaaggaaatatcttcagataaaaactggaaagaagctttctgagaaactactatgtgatgacagcattcgtctcatagagttaaacctttcttttcattgagcagtttagaaacacagtttttgtagaatgtgagaagggatatgtgggagggtttgaggcctatggtgaaaaacaaaatgtcttcagataaatactagaaagaagctttctgggtgactgccttgtgatgtgtacactcatgtcacagagttaaacattattttttgattgatcagtttggaaacactcttttggtagaatcaatgaagagatatttgggagcgtattgagctctatggtgataaaggaaatatctttagataaaaactagaaagaagctttctcagaaagtgttttgtgatgtgtgcattcttctcacagagttaaacctttcttttcattgagcagtctggaaacactgtttttgtaggatctatgaagagatatatgggagcacattgaagcctatggtgaaaaaggaaatgtcttcagataaaaaatagaaagaagctttctgagaaactgctttgtgatatgtgcattcatgtcacagagttagacctttcttttgattgtgcagtttcacaacattgttgttgtggaatctaagaggggatatttgggagtgctacaagaccttgaatgaaaaaggaaatatcttcagataaaaattagaaagaagctttctgggaaactgttttgtgatgtgtgcattcatttctcagaggtaaaacttttttttgatagagaagtttggaaaacgtatgtttgtataatctgcgaagggacttttgggattgatttgaggcctatgctgaaaaaaggaaatatcttcagataaaaagtagaaagaagctttctgagaaactgctttgtgatgtgtgcatttatcccacagaattaaaacttccctttgattgggcagtttggaaacacagtttttgaggtacctgtgaagggttatttgggagcacatcaagatctatggtgaaaaaggaaatatcttcagataaaaagtagaaagaagctttctcagaaccgctttgtgttgtctgcattcttctcacagagtcaatcctttcttttgatagagcagtttttaaaacctgattttatagaatctgtgaaggcatatatgggagcccataaggccaattgttaaaaagataatatcttgagggaaaaactagaaagaagctctctgagaaactgccttgtgatgtgtgcattcttctcacagagttaaacctttcttttgattgagcagtctggaaacactgttttcgtaggacctatgaagagatatatgggagcgcattgaagcttatggtgaaaaaggaaatatcttcagataaaactagaaagaagctttctaggaaactgcgttgtgatgtgtgcattcatctcacagagttaaacctttcttttgattgtgcagttttgcagcattgttgttgtggaatctaagaagggatacttgggagtgcaataagaccttgaatgaaaaaggaaatatcttcatataaaaattcgaaagaagctttctgggaaactgttttgtgatgtgttcattcatttctcagagttaaacctttttttttgatagagaagtttggaaaccgtgtgtttgtataatctgcgaagggatgtttgggatcgatttgaggcctatggtgaaaaaaggaaatatcttcagataaaaactagaaagaagctttctgagaaactgctttgtgatatgtccattcatctcacagaattaaaacttccttttgattgggcagtttagaaacacagtttttgaggtatctttgaagggataattgggagcgtattgagatctatggttaaaaaagaaatatcttcagataaaaagtagaaagaagctttctcagaaactgctttgtgatgtctgcattcttctcacagaattaaacctttttttttgattgagcagtttggaaacactgtttttgtagaatctacacagggatatattgaagagcatggaggcctatggtgaaaaaagaaatctcttcagataaaaagtagaaagaatttttttcagaaactgctttgtgatgtggacattcctctttcagagttaaaccattcttttgattgagcagtttggaaccactgtttttgtagaatctatgaagggatatatggaagggcattggcacttgtggtgaaaaaggaaatatcttcatagaaaaactggaaagaaactttctgagaaactgctttgtgatgtgtgcattcatctcacaaagttaaaccattcttttgattgagcagtttagaaacactgtttttgtggaattttcaaagggatatttgagagtgctttgaggtctatgctgaagaaggaaatgtcttcagataaatactagaaagaagctttctcaaaaaccgctttgtgcctttgtgcgttcttctgacagagttaaatctttcatttgattgaggaaattggaaacactgtttttgtagaatctgagaggggatatttggaggcactttgagaactatagtgaaaacagaaatatcttcagataaaaagaagaaagaagtttctcagaagctgcattgtgatgtgtgcattcttctcacagaattaaacctttcttttgatagaacagtttggaaatactgtgtttgtagaatctacacagagatatatgagagcacattgagtcgtaaggtgaaaaaggaaatatcttcagattaaaaatagaaagaaggtttctaatatgtgcatttctctcacagagataaacttttttgattgtgtggtttgtaaacactttttgtaaaatcaataagggatatttcagagcactttgaggcctaaggaagaacaagaaatgtgttgagataaaaactagaaagaagatttctgagaaactgctttgtgatgaatgccttcatctcacagaattaaaactttcttttgattgaacagtgtggcaacacgctttttgtggattccgaaggggatattttggagtgctttaaggcctaagtgaaaaggaaataccttcagataaaaattagaaagaagctttgtaggaaacggctttgtgatttgtgcattaatctcaaaaatttaaaacagtattttgattgagcactttggaaacactgttttggtggaatctgtaaagggatatttctggaaagatgcattctggtaaactgctttcagatgtgtgcattgatctcacagagataaaattttctttggattgagcagtttggaaacactgttttggtaggatctgtgaagggatatttgggaacacattgaggcctacaatgaaaaaggaaatatcttcagataaaatctagaaagaagcttttgagaaagtgctttgtgatgagtgaattcatctcccagagttaaactttccttttcattgagcattttggcaatactctttttgtggaatctcagaagggatatttgggagctctttaaggcttagggttgaaaaaggaaataaaatcagataaaaactacaaagaagctttctgagaaactgctttgtgatgtgggtattcatcttacagaattaaaccgttcttttgattgagcagtttggaaccattgtttttgtagaaactatgaagggatatatgggagggcattgatgcctatgttgaaaaaggaaatatcttcatagaaaaactggaaagaaacatcctgaggaactgctttgtgacgtctgcatatatctcacaaagttaaaccattcttttgattgagcagtttggaaacacagtttttgtagaatttgcaaaggggtattttggagtgcttcgaggcctatgctgaagatggaaatatcttcagataaataccagaaagaagctttctcagaagccgctttgtgatgtgtgcattcttctcactgagttaatcctttatttcgattgtgcagtttggaatcactgttttggaagtatttgcaaagggatatttaggagtgcattgaggtctatggtgaaaaaagaaatatcttctgataaaaactagaaagaaactttctcagaaaccattttgtgatgtgtgcattcttctcatagcgttaaaactttttttgattgagcagtctggaaaaactgtcttggtagaaactataaagggatacatgtgagcatcttgaggcctatgggaaaagggaaatatcttcagagaaaaactggaaggaaacattctgagaaactgctttgtgatgtgtgcattcatgttacagggttaaaacttcctttttattgagcagtttggaaacactggtagaatctgtgaagagttatttgggagctctttgaggcctatggtgaaaaaggaaatatcttcagatacaaactagaaagaagctttctttgaaacttctttgtgatgagtgcattcatctcacagaggtaaaactttcttttgattgagcagtttggcaacactgattttgtaaaatatgagaagtgatatctgggagtggtttgaggtctatggtgaaaaaggaaatatcgtcagataaaaactagaaagaagctttctgggaatctgctttgtgatgtgtacattcatctcacagagttgaacctttcttttgattgatcatttcagaaactgcttttgtagaatctgtgaagggatatttgggagcattttgaggcctatgctgaaaaaggaaatatcttcagatgaaaactacaaagaatgtttctgagaaactgctttgcaatgagttcattcgtctcacagagttaaacatttcttttcattaagcagtttggcaacactattttttgtagaatctgcaaggtctatggagaaaaagaaaatatcttgagaaaaaactagaaagaagctttctgagaaactgctctgtgatgagttcattcatcacagagagttaagcctttctcttgattaaacagtttggacacactgtttttgtagaatctgtgaaggattattttgtattgccttgaggcctgcggtgtaaattgaaatatctttagataaaaactagaaagaagctttctcagaaactgcttggttatgtgtgcattcatttaacatagataaactttttttgattgagcagtttggcaacactatttttgtggaatctgcaaagggatatttgggagtgctttgaggcctatggtgaaaaaggaagtatcttcagacaaaaactgcaaagaagctttctgagaaactgcgttgagatgtgtgcattcttctcacagaggttttttgtttgtttttttgtttgtttgttgaccagtcttgaaacactgatttgtagaatctgcatagagatatttgggagcagattgaggcctatggtgaaaaaataaatatctttacataaaaactagaaagaagctttctaacaaaccactttgtgatgtgtgcattcttcacacaaagttaaaactttcttttgattgaacagtctggaaacagtctttttgtagaatctacgaagtgatatataggagtggatgaggcctgcagtgagaaaggaaatgtcttcagagaaaaactagaaagaagcattctgagcaacttctttgtgatttctgcattcatctcccagagttaaatctttcttttgattgcacagtttggaaacactgttttggtagaatctgtgaaaggaaatttgggagtgcattgaggccaatgagaaaaaggaaatatcttcagataaaagctacaaagaagctttctgagaaactgccttgtgattagtgcattcgtttcaaaggtttaaacctttcttttgattgagcagtttggcaacactctttttgtggaatctgagaagggatatttgggagtgtttcaagatctagggtgaaaaaggaaatatcatcagataaaaagtacaaggagttttctgggaaactgctttgtgatgtgtgcattcatctcacacagttaaacctttttttgattgagcagtttggaaacactgtttctgtaaaattctccaagggatatttgggagggctttgagtcctatggtgaaaaaggaaatatccttagatacaatctagaaagatttctgagaaacagctttgtgatgtgtgattttgtctaacagactaaatcctttcttttggttgatcagtttgaaaactgtttttctacaatctgtgaatgcatattttggagtgcattgatgcctatggtgaaaaaggaaatatctttacataaaaaactataaagaaatttctgaaaaacagctttgtgatgtgcatattcatttctcagagttaaaactttcttttgattgaggaatttgtaaacactgtttttgtataacctgcgaagggctgttagggagagcattgaggcctatggtgaaaaagaaaatatcttcagataaatattgaaaagaagcttccaaagaaactgctttgtgatgtttgcattcatctcacggagttaaagctttattttgattgaccagtttggaaacactgattttgtattatctttgaaggcatatttgggagtgcattgtggagtatggagaagaagaaaatatcttcagaagaaaaccagaaagaagctttctgagaaactgcattgttatgtgtgcattcatctcacagagttaaaactttcttttgattgagcaggttggaaaccctgttgttggagaatctgtgttgggatattagggagtgccgtgaagcctatggtggaaaaggaaatatctccagataaaaactagaaagaagctttttgaaacactgatttgtgatgtgtgcattcatctcacagagataatcctttcatttcattgagcagtttggaaagactgtatttgtagaatctgcaaaggcatatttgggagcacactgaggcttacagagaaaaaggatacaccttctgataaatctagaaatacgctttgtgagaaactgctttgtgattggggcattcatctcacagagttaaacctttcttctcattgagaagtttggaaacactgtttttgtggaaactgtgaaggagtatttgggactgatttgaggcctatagcaaaaaaggaaatatcttgagataaatttagagagaagatttgtgagaaactgctttgtggtgggtgcattcatctcacatatttgaatctttctattgattgagcagtttggaaacactctttttgtagattctgcaaaggtatatttgggaatgccttgaggcctatggtgaaaaaggaaataccttcagatgaaaactagaaagattcctgagaaacagctttgggatgtgctcattcttctaatggagttaatactgtcttttgatagcgctgcttggaaacactgtttttgcagaatctgtcatgggatatatgggagcacatcgaggcctaaggtgaaaaaggaaatatcttcacataaaaactagaaagaagctttctcagaaaccgttctgtggtgtctgcattcatctcacagatttatagtatgttattttattgaccagtatggaaactgattttgtagaatttgtgaagggatatttgggagcacattgaggtctatggtgaaaaaggaaatatcttcatatgaaaactagaaagaagctttctgaggaactgctttgtgataagtgcattcatctcagatattccaacttttctttagattgaccagtttggaaacacagtttttgtagaatctgcgaagggacattttggagcccatggatgcctaggctgaaaaactaaatatcttcagataaatactagaaagaagctttctcagaaactgttttgtgatgtgtgcattcttctcagagagttaaacctttctttagattgagcactttggaagtacggtttttgcagaatctgtgaagggctaaatgggagtgcattgaggcctattgtggaaatggaaatatttaaagtgaaaaactagaaagaggctttctgagaaaatgctttgtgatgtgtgcattcttctcgcagagttaagcctttgttttgattgtgcagtttggcaacgctgttattgtggaaactaagaagggatatctgggaacactttaagaactaaggtgaaaactgaaatatcttcagataaaaaggataaagaagtttaatgcaaaactgatttctgatgtaggcattcatctcacagagttaaacttatttttaattgagccatttggaaacactgtttttgtagaatctgtgaagatatatttgggagtgctttgaggcctatggtgaaaaaggaaatatcttcagataaaaagtagaaagaagctctttgagaaactgcttgtgatgagttcattaacctcacagagttaaaactttcttttgattgagtagtttggaaacactgtttttgtagaatctgtagaatcctcgaatggatatttgggagcatttagaggcctttggtgaaaaaggaaatatttttgagaaagactagaaagaaactttctgagaaactgctttgtgatgtgtgcattcacctcacagagttaaacttatctttgcatgagcagtttggaatcactgttttggtaggatctgtgaatggatatttcagagcacttacaggcctatgataaaaaaaaggacgtatcttcagataaaaactagaaagaaggtttctgaaaaactgctttgtgatgagcacattcatatcacagagttaaacctttcttttgattcagcaggttgacacagagtttttgtagaacctgacaagggatatttagcagtgctttgaggcctattgtgaaaaatgaaatatcttctgatagaaactagaaagaagctttctgggaaactgccttgtgatgtgtgcattcatctcacaaagttaaacctttcttttgattgagcagtgcagaaacactgttttggtagaatctgtgaagagatattttgggacatacttgggtatatgtttaaaaaggaaatgtcttcagataaaaactggaaagaagctttctaagaaactgctttgcaataagtgcattcatctcatggagttaaaaacttcttttcattgagcagtttgggaacagagtttttgtagaatctgagaagggatatttggtaatgctttgaggcctatggcaaaaatcaaaatatcctcagttaaaaactagaaagaaattttctgagaaactgaattgtgatgagtgcattcgtctcaaagagttaaacccttcttgtgattgagcagttggaaacactcttttggtaaaatctgcaaagggatatttgggaatgctttgaggcctatggtgaaaaaggaaatagcttcagaaaaacactaaaaagaaggtttctcagaaactgctttgctttgtatgcatatttctcaccgagttaaacctttgtattgattggccagtttggaaacactgtttttgtagaatatgcaaaggaatatatgggagcccttgaggcctattgtgaaaaaggaaatatcttcatggaaaaactggaaggaagccttctgagaaactgcgttgtgatgtgtgcattcagctcacagagttaaacctttcttttgattgaccaggttggaaacactcttctggtataatctgtgaagggataattgggagcatattttcatctatggtgaaaaaggaattatcttcagagaaaaactagaaagaagtttcctgagaaactgctttttgatgagtgtattaatttcacagggtgaaacctttcttttgattgagcagtttggaaacaatgttttattagaatctgagaaaagatatttgggagcgctttgagtcctatggtgaaaaaagaaatatctgcagataaaaatataaagaagattttgggaaactgctttgtgatgtgtgcattcatctcacagagttaaacctttcttttgatagagcagttcggaaacactgtttatggagaatctgtaaagggatatttaggcatgcattgaggcttatgttgaacaaggaaatatcttcagagaattactagaaagaaactttctctaaaaccacttgtgagatgggtattcttctcacagagataaacctttcttatgactgagtagtttggaaacactgtttttgtaaaatctgtgaagggatatttgggagtgcattgaggcctatgttgaaaaaggaaatatcttcagagaaaaacaagaaaaaagctttttgggaaaatgctttgtgatttgtgtattcatctcacagagttaaatctttctgtttattgagctgtggttgaaaacactcttttagtagaatctgagaagggaccttagggagcccattgaggcctttggtgaaaaaccaaatatcccaagataaaaattataaagaagctatctgtgaaattactatgtgatgtatggattcatctcacagttttaaaactttcttctgatttaatgggctggaaaccctatttttgtagaatctgtgaagggaaatttgaaatccctttgagggcttatgaaaaacaaaatatccccagataaaaacaagaaagaagctatctgtgaaactaacttgtgatgcgtggattcgtctcacagagttaaacctttcttttgattcagcaatttgcagacactcctttttggaatctgtgaaggaatatttgggagcccatttcagcttatggtgaaatatcaaatatccccagataaaaactagaaagaagctaactgtgagacttctttgtgatataggattcatgtcacaaggttaaaactttgttttgacttagcgagttggaaatattttttgacaaaatctgttgaggtacttggaaacagtgcttttgtagaaacagtgaatggatatttgggactgctttaaggcctatggtgaaagaggaaatgccttcagagaaaaactcaaattaagctttctgagagactgctttgtgatacatgcattcatctcatggagttaaacatttattttgattgagcagtttggaaacactgttgtggtagaatctgtgaagagatatttgggagcactttgaggcctatggtgaaaaactcaataactccagataaaaactagaaagaactatctgtttaacttatttgtaatgtctggatttatctcacagaggtaaacctttatattgattcagcaagttgaaatcactcttttgatagaatctgccaagggacatttcagatcctttagaggcctatagtgaaaaactgaatataccttgataaaaactagaaagaagctatctgtgaaacttcattgcaaagtgtggattcatgtcagagttaaatatttcttttcattcatcaggtgggaaacactcgttttgtagattctgtgaagatacattttggagcccattgagtcctatggtgaacaacccaatatttccagataaaaaccagaaggaagctatctgtgaaactgctttaagacacgtgattcatctcaaagaattaaactttatttttgattcaataggttggagacactcattttgtagaattggagacatgatattttggatcccattgtggcctatggtcgcaaacccaatatcccaagataaaaactaaaaaggagctgtgagtgaaactgctttatgatatttggatttatctcacagagttaaactgttcttctgattcagcaggttgtgaacactctttttgtagaatctgcatagggacctatcacagcccattgaatactatggtgaagaaatggataacccgagataaaaaccagaaagaagctatttctgaaagtgcattgtgattcttgcatttatctcacagtgttaaatctttctattgattcagcaggatggaaacactctttagataaaatgtgcaaatgaacatttataaactcatagaggcctgtggtgaaaaacagaatatccccacataaaaactatcaaaaactatctgtgaaactgctttgttaagtgtggattcagctcaaagggttaaacctttctattgattcagcaggttgcacacgctcttttgctagaatctgcaaagggacatttttgagcccattgtagcacactgtgaaaatggaatattcaaatataaaaactggaaagaagtttttagtgaaacttcttggtgatgtgtggatgctactcacagagtttaacttttctattgattcagcagtttggaaacactcttttggtaaaagcagaaaatggacatgtgggagaactttgagacctatggtaaaaaaaaaaaaatatttccagataaaaattataaagaagctatctgtgaaactgctctatgatgtgtggattcatctcacagagttaaacatttcttttgattcggcaggttggaaacactttcttggcagaatctgcaaagggagatttagaagatttttgaggcctatggtgaaaaacagaatatccacagataaaaactacaaagtagctatctgtgaaactgctttgtggtgtgtggactcatctcccagagataagcctttcctttgattcagcactttggaaacactcgttttgtagaacctgagaagggacattttgaagccgactgagcattggaagctttttgaggcctatggttgaaaacagcatatccacagataaaaactacaaagtagctatctgtgtaactactttgttatgtgtggattcatctcacagagttaaacttttcttttgtttcagcaggctgcaaatatttatgttttgtaatctgcatagtgacatttgggagcccataaaagcctatggtgaaaaatcaaatatccccagataaaaatcagaaagaagctctctttgaaactgctttgtgatgtgtagattcatctcaaagacttcaacctttcttttgactcagcatgttggaaagactcttttggtagaatctgtgaaaggagatttgtgagcccactgtagtctatggaaaaaaaacaaatatttcaaggtaaaaactagaaataatctatcaatgaatctgctttgtgatacatggattcatatcacagagttaaaactttcttttgatttagcaggttggaaaatcctctttgtagaatcttcgaagttacattttagagatctttgaggcctataatgaaaaaccgaaaatccctagataaaaactagaaggaagttctttgtgaaactgtttgggatgtgtttattcatctaacagaattaaacctttctgtcaatatagcatgtttgaatcacatttaaggtagtttctgtgaagggacttttcaaagcccttacaggcctatggtgaaaaacagaatatctgcaaacaaaaagtagagaaaagctaaatatgtaactgcttttgatgtatggattcatctcacagagttaaacctttcttttattgtaacaggttggaaacactcttttgttggaatctgtgaagggaagtttgggaacccatcaaggcctaaggtgaaaaacagaatatccccagataaaaactagaaaaaactctctgtgaagctacttagtcatatgtggattcatctcaaagggttaaacttgttttcaattcaaggggttagaaacactctttttctagaatctgcaaaggcacatttgtgagcccactgtagtctatggggacaaacagaatatcctatgatcaaaactagaaagaggctatgtgtgaaactcccttgtgatgtgtggattcatcccaaagaggtaaacgtttcttttaattcagcaggttgcaagctgtacttttgcagagtctgagaagggacatttgaaagccctttgggttctttggtgagaaaccaaatgtccacagataaaaagtaggaagaaactatctgttaaactgctttttgatatgtggtttcatctcacagtgttgaacctttctttttactcagcaatttggggacagtcgttggttagaatgtatgaggaaatatttgggagctttttgaggcctatggtgaaaaaccgaatatccccagataaagcctagaaaaaagctgtctttgaaactgctttgtgatgtgtgtattcatcttacagagttaaatttttattttgatacagcaggtttgaaactctctttaggtagaatctgtgaagggacatttgggaacactttgagccctatggtgaaaaataaaatagccccagataaacacgagaaagaagctaactgtgaaactgctttgtaatgtatggattcacctcactgagttgaacatttcttttgattcagcaggttggaaaccctctttttggagattctgcaaagggacatgtgtgagcccttagaagcctattgtgagaaacagaatatccacagataaaaactagaaataaggtatcagtgaaactgctttgtgatatgtggattcatctcacagaggtaagcctttcttttgatacagcaggtttgaaagacttttttggaagaatctgcaaagggacatatggaagcccatagaggtttctgttcaaaaactgaatatcttcacataaatactaggaagaagctataagaagctattggtgaaacctctttgtgatgtgaagattcatctcacagagttaaacatttcttttgattcagcagcttggaaacactcgttctgtagagcctgcagagagacatttgggggctcatagagacctaaagtgaaaagcccaatatccccagataaagactcgaaggaatctatccgtgaaactgctttgtgatgtgtggattcatctccctgagttaaacctatcttttgattaagcatgttggaatcactcttttggtagaatctgcaaagtaacatttgggcaccctttaaagcctacagtgaaaaaccgaatatctccaaataaaaacaagaaagaagctatctgtgaaagggctttgtgatgtgttgattcatctcacagatttcgaccttacttttcattcagcatttttagaacactctttatgtagaatcaacgatgggacatttggcagcggttttttggcctctggtgaataactgaatattccaagataaaaattagaaagactctgtctgtaaaacggctttttgatgtgtggattcatctcacagagttaaacattatttttgattcagtagcttgtaaacactcattaggtagaatcagtggaaagacatttgggagcccatagaggcctaaggtgaaaaactgaatatccccagataaaaactagaaagaagctatctctgtaactgttttgttatgtgtggattcatgtcacagagctaaacctttcttttgattcagaaggttgcaaatacttatgtttcataatctgcatagtgacatttgggagcccattaaagcctacagtgaaaaatcgaatatccccagataaaaaccagaaagaagctatctttgaaactgctttgtgatgtgtggtttcatctcatagtcttaaaccttacttttgactcagtattttggaaacactcttttgctagaatccaggaatggagatttgtgagcctactctagtttatggtaaaaataaaaacaaacaaatatttcaagataaaaactagaaagcagctatcagtgaatctgttttgtgatgcgtagattcatctcacagagttaaaccttccttttgatttagcagtttggaaacacctttttgtagaatctgtgaagggacatttgagagaactttgacacctataaggaaaaacaaaaatcctcagataaaaactagaaggaagctctttgtgaaactgttttggatgtgtttattcacctaacagagttaaacctttctgtcaatatagcaggtttgaaacattttttagatagaatctgaagagcccatagaggcctatggtgaaaaacagaatatccccagatagaaagtagaaaaaagctaaatatgtaactgctttgtgatgtgtgtattcatctcacagagttaaatctttcttttgacacagcatatatgaaacactctttagatagtatctgcaaagggacatttaagagcccttagaggcctatggtgaaaaactcaaaaactctagataaaaactagaaagaagctatctgtttaacttatttgtaatgtctggatttatctcacagagataagcatttatattgattcagcaagttggaatctctcttttggtagaatctgccaagggacatttggaatcccttaaaagtctattgtgaaaaactgaatataccttgataaaaactagaaagaagctatctgcaaaactgcatgataaagtgtggattcatgtcagagagttcaacatttattttgattcatcacgttggaaacactcgttttgtacactctgttaagagacattttggagcccattttgtcctatggtaaacaacacaatatttccaaataaacaccagaagaaagctatctgtgaaagtggtttgtgatgtgtgattcatctcacagatttaaacttttttttattcaataggttggagacactcattttgtagaattggcaatgggatattgtggagcccagtgaggcctatggtgaacaatccaatatttccagatgaacaccagaaagaagctacccgtgaaactgctttgtgatgtgtgattcatctcacagatttaaactttttttttgattcagtaggatggagacactcatttttttgaatcaactatgggatattttggagcccattggggcctatggtgaacaatccaatatttccagatgaaaacaagaaggaagctatccatgaaactgctttgtgatgtgcaattcatctcacagatttaaactatttctttattcagtaggaaggagatattcttttttttgaattgactatgggatattttggagcccattgaggactatggttgaaaagaaaatatcccaagctaaaaactaaaaaggagctatctgtgaacctgctttgatgtttggatttatctcacagagttaaacctttcttttgattcagcaggttttaaacactcttttggtagcatctgcatagagacgtatcacagcccatcgaggcctatggtgaacaaatggatatcaccagataaaaactagaaggaagctatttctgagaccgcattgtgatctgtgcatttatctcacagagttaaatctttctattgattcagcaggatgcaaacactctttttgtagaatctgcaaagggacagttgggagcccatttaagcctatggtgaaaaattgaatatccccagataaaaactagaaataaccaatcagcgaaactgcttttttgttgtgtggatgtatctcacagacttaaaaatttcctttgattttgcaggtttgaaacataccttttgcagaatctgtggagggacattttggaaccccttaaggcctgtcgtgaaaaagaaaatattccgagatgaaaactagaaagaagctatctgtgaagtgctctgtgacgtatggagtcattgcacagagctatacccttctattgatacagcaagatggaaacaatctttacatagaatctgcgaaggaacatttataagcccttagaggactatggtgaaaaacagaatatccccacataaaaactatcaagaagctatctgtgaaactgcattgttaagtgtggaatcagctcaaaggcttaaaactttcttttgaatcagcaagttgcagacactcttttgctggaatctgcgaagggacatttgtaagcccattgtagcacactgtgagaaatggaatattcaaagataaaaactagaaagaagcttttagtgaaactacttcatgatgtgtggattctactcacagagttaaactttttattgtttcagcaggttggaaacactcttttggtaaaattgggaaaggcacatgttggagcccattgagacctattgtgaaaaactgaatattcccagatacaaactacaaagaagctatctgtgaaactgctctatgatgtgtggattcatctcacagagttaaacctttcttttgattcagcaggttggaaacacttttttggcagaatctgcaaagggagatttggatctttttgcagcctatggtgaaaaacagaatacccagagtttaaaaactgcaaagtagctctctgtgaaactgctttgtgatgtgtggattcatcacacagagataagcctttcctttgatttggcaggttggaaacccttgttttctaacctgataatgaatattttgaagcttgttgaggcctatggtgaaaaaaaaaatccctagttaaaaactagaaggaagctaccagtgaaactgctttgtgatgtgtggattcaccactgagagttaaatctttcttttcatccagaaaattggaaatattctttagatagaatatgcacagggacatttgggagaccatagaggctaatggtgaaaaacagaatatcctcagataaaaactagaaagaaggtgtctgtgaaactgttttgtgatgtgtggattcacctcacagaattaaacgttgttttgattcaacaggtgtgagaccctcttttcataggatctgtgaagggacatttggaagcccattgaggtttatggtgaaaaaccgaatatttctagataaatactagaaataacctagctgtgaaactgccttgtgatgcgtgcattcatttcacagatttaaacaatccttttgattctgtaaattggaaacactcttatggtagaatctttcaagggacatttcggagcccttagatgcctatgtaaaaaaccaagtatacccagataaaaactagaaagaagctatctgtgaaacagctttgtaatgtttggattcaaatcacaagcttaaacctttcttttgattcagcgggttacaaacaccatttaatagaatctgcgagggtagatttgggaaccatttcaggaatgtagtgaaaaactgaatacacccagatacaaaccagaaagaaactatttgtgaaactgctttttttttttgtggattctcctcacagagataaacatttcctttgattcagcaggttggaaacactcattttgtagaatctgaatggggcattttgaagccctttgaggactatggtaaaaaaaaaataaaaacacaatatcctcagataaaaactatgaagaagctatctgtgagcttttttgtgatgtgtggattcatctcacagaggtaaaagtttcttttgatacagcatgttggaaacactgttttcatagaatcttcaaagtgaaatttaggagctttttgtggagtatggagaaaaactgaatgttcacacatgaaaactggaaagaagctatctgtgaaacagctttgtgatctgtggaatcatctcacagagctaaacctgtctattgaatcagcaagttgcatacactctttttgtagaatctgcgaataaacttttgggagaccattgagcctatggtgaaaaactgaatatccccagaaagcactagaaaaaagtgatctgtgaaactgctttgagttgtgtggattcctttcacagtgtcatacctttcttttgatttaacaagttggaaatactatgttgttagaatctgtgaagggacatttgggagcccatggggtcctatggtgaaaaaccaaatatccccagataaaaaccagaaagaagctatctttgaaactgctttgtgatgtgtggatcatctgaaagacttaaacctttcttttgactcagcatgttggaaatactctttggctacaatctgcaaaaggagatttgtgagcccactgtactctatggcaaaatatgtgtgtgtgtgtgtgtgtgtgtgtgtgtgtgtgtgtgtgtatcagtgagtctgctttgtgatgcatggattcctctcccaaatttaaacatttgtttagattcagaaagttggaaacacctttttgtagaacctgcaaacggaaatttgtgagaccattgaggcctataatgcaaaacagaaaatctccagataaaaactagaagagagctctttgtgaaaccttttggggtgtgtttattcatttgacagaattaaacctttctgtcaatatagcatgtttgaaacattttttggatagaatctgtgaaggttacatttaagagcccatagagacctatggtggaaaacagaatatccctggaaaaaaagtagaaaaaagctaaatatataactgctttgagatgtatgcattcatcaaacagagttaaacctttcttttgacacagtaggtgtgaaacactttatagttagatctgtgaagggacatttaagagcccacagatgcctatggtgaaaaactaaataactccagatgaaaactagaaagaaactatctgtttaacttatttgtattgtttggatttacctcaccaagataaatatttctattgattcagcaagttggaatcactcttttagtagaatctgccaagggacatttgggatcccttagaggcctaatgtgaaaaacttaatataacttgataaaaactagaaagaatcaatctgtaaaactttattgtaaagtgtcatttcatgtcacatagttaaacagttattttgattcttcaggttggaaacactcgttttgtacattctgtgaagagacattttggagcccattgagtcctaaggtgaaaaacccaatatttccagataaaaaccagaaggaagctactatgaaactgctttgtgttctgtgcattcttctcacagagttaaatttttcttttgattcagcagtatggacacactctttttgtagaatctacaaactgatacaggggagcacattgaggcctgtagtgaaaaaggacatatcttcagagaaaaactagaaagaatctttctgagaaactgttttgtgatgtgtgcattcatctcacagagttaagcctttcctttgattgagcagtttgaaagcattatttcagtagaatctgtgaagggatatttgggagcacgttgggggctatggtgaaaaaggaaatatactcagagcaaaacgagaaataagttttctgagaaactactttgtcatgagtactttcatctcacagagttaacactttcttttgattgataagtttggtaacagtgtgttttgtagaatctgagaagggatatttgggagggctttgaggcctatggtaaaaatgaaatatcttcagataaaaactatgaagaagctttctgggtaactgctttgtgatttgtgcattcatctcacagagttaaacatatcttctgattgagcagttttgaaacactgtttttgtagaatctgtgaaaggatatttaggagccctttgatggtgaaaaaggaaatatcttcagaaaaaaacaaaaagaagctttctgagaaactgctttgtgatgagtgcatttatctcacagaatttaacctttctcttggttgagcagtttggaaacactgtttttatagaatctgcaaagagatatttgggagctcactgaaacctatggtgaaaaaggaaatatctacagaaaaatactagaaataagctttctcagaaataactttggaatgtgtgcattcttctcacagaactaaagctttctttttacaaagccatttggaaacactgtttttgaagaatctgcaaaaggatatttgggagcgctttgaggcctatggtgaaaaaggaaatatctccagataaaaacgagaaagaagctttctcagaaactgctttctggtgtgtgcattcttctcacagacttaaaattttattttgattgagctgtgtggacacacactttttgtagaatctatgaagggatacgtgggagtgctttgagccctaacatgaaaaaggaaatatattcagagaaaaactagaaagaagctttctgagaaatggctttgtgatatgtgcattcatctcatggagttaaacgtttcttttgaatgagaggtttggaaataatgttttggtagaatctgtgaagggatatttgggagcgctttgaggactatggtgaataaggaaatatcttcagaaaaaaaaagaagctttctgagaaactgctttgtggtgagtgcattcatctcacagaattaaacctttctattgatcaagcagtttggaaacaatgtttttatagaatctgcaaagggatatttgggagtgcattgaagtctatggtgaaaaaggaaatatccccagaaaaatactagaaagaagctttctctgaaatccttttgtgatgtgtacattcttctcacagaattaaacctttctttcgattgagcagtttggaaacactgttcttgtagaaagttcaaagagatatttgggagtgcattgaggcctatggtgaaaaaggaaatatcttcagattaaaaactggaaagaagacttctagaaattgctttgtggagggtgcattgttcttacagagttaaaccttcattttgattgagcagttgggacacagagcttttgtagaaactatgaagggatatttgggaatgcactgagccctagggtgaagaaggaaatatattcagagtaaaactaggaagaagctttctgagaaactgctttgtgatatgtgcattcatctcatggagttaaacatttcttttgattgagcagtttggaaacactgttgtggtagaatctgtgaagggatatttgagagcaacttgtggtgtatggtgaaaagggaaataatttcagataaaaactagaaagaagctttctgagaaactgctttgtgatgggtgcattcatttcagacttaaccttttcttttgattcagaagtttggctacactgtttgtagaatctgaaaagggatactggggagtgctttgaggccaatggtgaaaagcaaaataactaaaagaagctttctgagaaactgctttgtgatgagtccattcatatcacagagttaaacatttcttttgattgaatagtttggcagcattatttttgtagaatctgagaagggatatttggcagccaattgaggcctatggtgaaaaaggaaatatattcagataaatatgagaaggaagctttctcagataccactttgagatgtgtgcattcttatgagacagttaaacctttcctttgattgagcaatttggaaccactgtttttatagaatctgtgaagggatatttgggagtgcttttaggcctgtggtgaaaacagaaatatcttcagataaaaacaagaaagaggctttctcagaaactgttctgtgatgtgtgcattcttcccacagagttaaacttttcttttgattgagagtttggaacactgtttttgtagaatctacgtagtgatatatggaagcacattgaggcctactctgaaaaaggaaatatcttcagagaaaaactagaaacaggctttctgagaaactactttgtgatgtgtgcattcatctcacagagttcaacctttcttttgattgagcagtttggaaacactgtattggtagaatctgcaaaggtatatttgggatagctctaaggcctactagggtgaaaaagaaaatatcttcagataaaaaatacaaagagtctttttgggaaagtgctttgtgatgtgtgcattcatctcactgacttaacattttcttttcattgagcagtttggaaacactgtttttgtagaatctgtgaattgatatttgggagagcatagtgacctgtgatgaaaaaggaaatatcttcaaacaaaaactagaaagaagctttctgaggagctgctttgtaatgagtgcactcatctctcagagttaaacttttcttttgattgagcagctttggaacagtgtctttgtagaatctgagaagggatatttgggagcgctttgaggtgtaaggtgaaaaatgaaatatcttcagctaaaactagaaagagacttttgggagtctgctttgtgatgtgtacattcatctcacagatttaaacttttctcttcattgagcagtttggccatactgttttgtacaatctgagaaggtgtatttgagagccccttgagacctttggtgaaaaaagaaataccttcagataaaaactagaaagaatctttccaggaaactgctttgtgatgtgggcattcgtctcacagatataaaacttttttttgattgagcagttttgaaacactgtttttctagaatctgggaagggatatttgggagtgcattgtggccaatgggaaaaacagaagaacttcagataaaaactacagaaaactttctgagtaactgcttagtgatgagtgcattcaacccacacagttaaacttttcttttaatacagcaattaagaaacagtgtttttctagaatctgagaagcgatatttgggagtgctttgaggcctatggtgaaaaaggaaataccttcagataaaaactagaaagaagctttctgagacactgctttatgatgagggcattcaactcacacagttaaaccttttttttttttttttttgattgaacagtttgggaacagcgtttttgtagaatctgagaagggatattagggagcactttgaggccaacggtgaaaaataaaatatctccagataaaaactagaaagaagctttctgggaaactgctttgtgatgtgtgcattcatctcccaggtttaaacatttcttttgattaagcagattggaaacactgtcttggtagtatctgcgatgggatatttgggatcactctaaggcctatcttgaaaaaagaaatatattcagataaaaaatagaaagaagctttctgagaaactgctttattatgagtgcattcatcttacacagttaaacctttctttagattcagcattttgggaacagtgtttttgtagaatctgagaagggatatatgggagcgctttgaggtgtttggtgaaaaacgatatatcttcagataaaactggaagaaagctcttaggaatgtgatttgtgatatctgcattcatcttacagagttatgcccttcttttcagtgagcagtttggaaacactgttgttggagaatctgccaagggatatatgggagcccattgagggctacagtgaaaaaggaaatatcttctgataaaaagtagaaagaagctttctaagaaacagctttgtgatgtgtgcattcatctcacagagttaaacgtttcctttgattgagcagtttggaaacactcttttggtagaatctgagaagggatatttgggagcgccttgaggcctatggtaaaaaaggaacatcatcagagaaaaagtagagagaagctttctgagaaactcctttgtgatgtgtgcatacttctcacagagaagagtgttttgaaacactctttttgtagaatttgagacgggatacttgggagtgcattgaggcctacgttgaaaaagtaaatatcttcacataaaaattagtaagaagctttctgagaaaccacttcgttatgtgttcattcttcttccagagttacaattttcttttgattgagcagtgtggaaatgctgtatttgtagaatctacaaagggatatacaggacggcatttagaactatgtgaaaaagtaagtatcttcagaggaaaactagaatgaagccttctgagaaactgctttgtgctgtgtgcaatcatctcacagaattaaacctttcttagaatcgaacagtttgacaagactgtctttgtataatctgcaaagagatatttgggagcacatttaggcctatggtgaaaaaggaaatatcttcagataaaaactagaaagaagattctgagaaaccactttgtgatgtgtggattcttctcatagagttaaactttccttttgatagagcagtttggaaacagattttgtggaatgtaccaatgatatatgggagtgcattgaggtctatggtgaaaaaggtaatattgtcagagaaaaactagaaggaagggttctcagaaactgctttgtgatgtgtgcattcagttcacagagttaaacctttcttttgtttaagccattttgaaacactctttttgtagaatctgtgaagggatatttgggagcacattgaggcttctggtgaaaaaggtaatatctaaggataaaaagaagaaagatgcttcctgatgaactgctttgtgataagtgcattcatctcacagaggtaaacctttcttttgattgagcagttggcaacactgcttttgtggaatctgagaagggatactgggagcactttgaggcctatggtgaaaagcaaaatatgtacagataataactagtaagaagatctttcagaaactgctttgtgatgtgtgtattcatctcagagtttgatctttcttttgattgagcagatctgaaactctttttgtagaatctgcaatgtgatatttgggagcacattgaggcttaaggtgaaaaaggaaacatctttacataaatactggaaagaagctttctcagaaattgctccatgatatgtgcattcttatcacagagttaaacctttcttttgattaagcaatttgcaaacactgtttttgtagaatctacaaagggatatttgggagcactttgaggcctatgatgaaaacagaaatatcttcagataaaaataagaaggaagctttcccaggaactgctttgtgatgtgtgaattcttctcagagagttaaacatttattttgatacagagtgtggaaacactgttttagaagaacctacacagggatatataggagcacattgaggcctatggtaaacgaggaaatatcttctgagaaaaactagaaagaagctgtctgagaaactgctttgggacatgcgcattcatctaacggagttaaaccttctttttgattgagcagtttgtaaacactgttatggtacaatccccaaagggatatttgggatcactttaaagcctagggtgaaaaaggaaacatattcagaaagaatatttcctagaaagaagctttctgggtaacagctttgtgatgtgtgcattcatctcacagaattaaatctgtgttttgattgagcaggttagaaacactgtttttgtagaatctgcaaagggatatttgggagcatattgtggcctatggtgaaaaaggaaatgtcttcagataaaaacttgaaagaaactttctgagaaacggctctgtgatgagtgcattcatctcacacagttaaacctttcttttgattgagcagtttgagaacagtgtttttgtagaatatgagaagggatatttgggagtgctttgagtcatagtgtgaaaaactatatatcttcatgtaaaaactagcaagaagatttctcagaaaccgcatagttttgtgttcattcttctcatagagttaaacctttgttttgatttagaagtgtggaaacactatttttgtagaatctacgaaaggatgtatgggaatgcattgagatctatggtgaaaaagtaagtgtcttcagagaaaaactagaatgaagctttctgagaaagtgctttgtggtatgagcattcatctcacagagttaaaccttttttctgactgaaccatttgaaaacactcttttggtttcaatctgtgaagagatatttaggagcacattgaggcctatggtgaagaaagaaatatcctcagataaaaactagaaagaagctttctgagaaactgctttgtaatgattgcattcatctcactgagttaaacttttcttttgattcagcagtttggtcttactattttgtagaatctgagaaggcatatttgagagtgatttgagtccttgggtgaaaaaggaaatatcttctgataagaattaggaagaagctttctgggacactgctttgtgatgtttgcactcatctcacgtagttaaaactttcttttgattgagcagtttggcaacactgtttttgtagaatctgtgaagtgacatttggaagtgcttcgaggcctaagctgaaaagggacatacctttagaaaaaactagaaagaagctttttgagaaactgctttgtgatgtgtgcattcatctcacagagttaaacctttctttttattgagcagtttggaaacaatttggtacaatctgagaaaggatatttgggagtgcattgaggtctatggtgaaaaaagaaatatcttcagagaaaaaccagaaagcagctttctgagaaactgctttgtgatgagtgcattcatctcagagggttaaacctttgttttgatagagcagtttggcaaaactgtttttgtagaatcagagaagggatttttgagagtgctttgaggactatggtgaaaaaggaaataccttcagataaaaactgggaagaagcattctgggaaactgctttgtgatgtgtgcattcacctcacagagttaaaaactttcttttgatttagcagattgaatatactgttcttgcagaatctacaaagggatatttgggagtgacttgaggcctatggtggaaaaggaaatatcttcagaaaaagactaaaaacaagctttctgagaaactgctttgtgagagtacattcatctcacggaattaaacctttttttaattgaaagtttggaaatactgttttggtagaaactgcaagctatatttgggaacgatttaagtcctagggagaagaaggaaatatcttcagaaaaaactagaaagaagctttctgggaaacctccttagtgatgtgtgcattcacctcacagtattaaatttttcttttgattgagcagtttggaaaccttgtttcagtaggatgtgcaaagagatatttggaagggcattgaggcatatggtgaaaaaggaagtatcttctgagaaaaactaaaaagaaactttctgagaaacttctttctgatgagtgcatttatctcacaaagttaaacctttcttttgattgagcagttgaaaacactgttttggtggaatctgcaaatgcatatttgagagtacttttaggcctagagtgaaaatagaaataacttcagatgaaaactacaaagaaactttctgggaaactgcactgtgatctgtgctatcaacacacaattaaagctttcttttaattgagcagtttggaaacaatgtactcctagatctgtgaagggatatttgggagcgctttgagtcatatggtgaaaagggaaatattttcagaaaaaaattggaaagaagctttctaagacactgcttagtgacgagtgcatgcatcacaaagagataaacatttattttgatcgagcagttggaacactgtttttgtggaatctacaaagagatatttggtgtgaattgaggcctatggtgaaaaaggaaacatcttcagataaatactagaaagaagcttctcagaaactttttttgatgagtccatttttctcacaaagttaaacatttctttggattgaggagtttgtaaacactgttgtggtagaatgagtgaaggaatatttgagagtgcattgaggcttatgataaaaaagaaattatcttcagagaaaaactagaaagaatttttctgagtaactgctttgtgatgagagcattcatctcaaagaattaaaccattctattgattgagcaatttttaaaaacttttggtaggatctgcaaagtgatatttcagaacactttgaggcttatggtgaataggaaatatcttcagataaaagctagaaagaagcttttggggaattgctttgtgatgatttccttcatctcacagggttaaacctttcttttgattgagcagtttggcaacagtgtttttgcagtatctgagaagagacatttggtagagctttgacccctatggtgaaaaatgaaatatcttcagataaaaactagaaagaagctttctgggaaactgctttgtgatatgtgcattcatctcccagagttaaccctttctgttgatagagcagtttggaaacactgtttatgtagaaactgcaagggaatatttgggagcacattgaggcttctggtgaaacaggaaaaactttcagataaatactagaaagaagatttctgagaaaccgctttgtgatgagtgcattcttctcaaagagttaaagctttcttttgattgaacagttttgaaacactgtttttgtagaatctgcaaagggatattttggagcatatgtaagcctatggtgaaaaaggaaatatcttcagataaaaacaagaaagaagcgttctaagaaaccactttatgatgtttgcactcttctcacagatttaaacctttctttttattgagcagtttggaaacactgttttggtagaatctgtgaaggtatattttggattgctttaattcctggggtgaagaaggaaatatcttcagtttaaaactggaaagaaacttcctgggaaactgctttgtgatgtgtaccatcatttcaaataattaaacttttcttttcattgagctctttggaaacaatgtttgacagaacctgggaagggatatttggagtgcattcaggcatacagtgaaaaaggaaatatattcacctaaaaagttgtaagaagctacctcagaaactgctttgtgatgtttgcactcttctcacagagttaaacctctcttttgattgagcagtttggaaacactctttttgtagaatgtgggaggggaaatttgggattgctttaattcctagggtgaaaaagaaaatatcttcagataaaaactagaaagaagctctctgggaaactgctttgtgatgtgtgcattcatttcatagaattaagcttttcattcaattgagcagtttggaaacaatgtttggtagaatctgcaaagggatatttgggagcacattaaggcctatggtgaaaaaggaaatatcttcacataaaaactagtaacaagctttctcagaaaccactttgttatgcattaattcttctcacagagttaaacctctcttttgattgagaaatctggaaacattgtttttgtacaattcacaaacggatatatgggaatgcattgagacctatggcgaaaaagaaaatatcttcagagaaaaactagaatgaagctttctgagaaactgctttgggatgtgtgcattcatctcgtggagttaaacattttttctgattgaaccatttggaaacactgtttcagtagaatctgtgaagggatatttgggaggtcattgaggtctatggagaaaaaggaaatatcttcagataaaaactagaaagaatatttctgacaaactgctttgtgatgaatacattcatctcacagaggtaacttttcttttgattcagcactttggccatactatgtttgtagaaactgagaaggtatatttgagagtgctttgaggcctatggtgaaaaaggaaatatcttcacataaaaactagtaagaagttttctggaaagaaaaaaacaaacaaccccatcaaaaaatgggcaaaagatatgaacagacacttctcaaaagaagacatttatgcagccaaaaaacacacgaaaaaatgctcatcatcactggccatcagagaaatgcaaatctaaaccacaatgagataccaactcacaccagttagaatggcaatcattaaaaagtcaggaaacaacaggtgctggagaggatgtggagaaataggaacacttttacactgttggtggcactgtaaactagtccaatcattgtggaagtcagtgtggcgattcctcagggatctagaactagaaataccatttgacccagccatcccattactgggtatatacccaaagcattataaatcatgctgctataaagacatatatacacgtatgtttatagcggcactattcacaatagccaagacttggaaccaaccctaatgtcccacaatgatagactggattaagaaaatgtggcacatatacaccatggaatactatgcagccataaaaaatgatgagttcatgtcctttgtaggaacatggatgaaactggaaaccatcattctcagcaaactatcgcaaggacaaaaaaccaaacactgcatgttctcactcataggtgggaattgaacaatgagaacatatggtcacaggaaggggaacatcacacaacggggactgttgtggggtgggggaggggagggggacagcattaggagatatacctaatgctaaatgatgagttaatgggttcagcacaccaacatggcacatgtatacatatgtaacaaacctgcatgttgggcacgtgtaccctaaaaataaagtacaataataataaaattaaaaacaaaagctttctgggaaactgctttgtgatgtttgcattcatatcacagagttaaaactttctgttcattgagcagtttaacaacaccatttctgtagaatctgtgaagggatatttgggagcatgttgaggcttatcatgaaaaagacatatcttcagacaaaactagaaaaaagctttctgagaaactgcttcgtgatatgtgcattcatctcacacagttaaaactttcttttgattaagcagcttggaaacactatttggtacaatctgcgaaaggatattttggagtgcattgaggcccatggtgaaaaaggaaatatcttcagagaaaaactggaaagaagctttctcagaaatagctctgtgatgagtgcattcatctcacacagttaaaactttcttttgattgagcagttttgttaaactgtttttgtagaatctaagaagggatacttgagagcactttgaggcctacagtgaaaaaggaaatatcttaaaaaaaattaaaaataagttgtctgagaaactgccttgtgataagagtattcaactgacatagttaaacctttcttttgattgtgcagtttgggaacagtgcttttgtagaatcagagaagggatatttgggatcgttttgaggccaatggtgaaaaatgaaatatcttcaggtaaatacaagaaagaagctttctcagaaactgctttgtgatgtgtgcattcatctcactgagttaaaactttcttttgattgagcagtttggaaacactgttttggtagaatctgccaaaatatattttcgagcctattgaggcctatggtgaaaagggaaatatcttcagattaaaactagaaagaagcattctcagaaaccagcttgtgatgtgtccattcttctcacagagttaaacctttctttagattgagcagttcggaaacactggtttggtagagtgtgcaaaggatatttgggagcacattgaggtctatggtgtaaagggaattatcttcagagaaaactaggaagaattttttggagaaactactttgtgatgtgtgtattcatctcacagtgttaaacttttcttttgagtgagcagtttgtaaacactgtttttatagaatctgtgaagggatatttgggaacacattgaggccaatggtgaaaaaagtaatatcttcagataaaaactagaaagaagctttctcagaaatggctttgtgatgtgtgcacccttctcacagagttaaacctttcttttaattgaacagtttggaaatattgttttgctagaatctatgaaggcatgtttagagaactatgaggactacagtgaaaaacgagatatcttcaattaaaaactggaaagaagatttgcgaaagactgctttgtgatgtttgcattcacctcacagagttaaacctttcttttgattgagcagtttggaagcgttgttttggtagaatctgtgaagggatatttgggagtgctttggggactatggtgaaaaagaaattatcttcagataaaaacttgaaagaagcttcctgggaaactgctttgtgatgtgtgcattcatctcacagaggtaaacttttcctttgattgagcagtttggaaacactgttttggtagaatctgtgaagggatatttgggatcacattgaggcctatgatgaaaaagtaaatatcatcagaaaaaaaaacgagaaagaagcattctgaaaaactgcattatgatgagtgcattcatctcacagagttaaattattcttttgattgagctgtttggaaacactgtttttttgtaatctgagaggggatatctgggagcactttaagacctagggtgaaaaatgaaataacttcagataaaaaacataaagcaactttgtactaaaaattaaaaactagaaattagcttcctgagaaactgctttgtgatatgtgaattcatctcacagaattaagtcttttttttgttgagcagttttttaaaccctatgtttgtggaatttgcggagggatatttgggagagcatagaggcctatggtgaaaaagcatatatcttcagataaaaactacaaagaggctttctcaaaaactgctttgggttcattgcattcttctcacagtgtgaaacctgtcttttaattgagtagtttgcagaaactcctttgtgatgaatatgtgaagggatatttgggaggcatgaggcctacgttgaaaaaacaaatatcttcagataaaaactagaaagaaattttctgagaaactgctttgtgatgaatgcattcatctcactgggttaaaactttcttttgattgagcagtttggaaacactgtctttgtagaatctacgaagggatatttgggagtgcgctgatgcctttggtgaaaaaggaggtatcttcagataaaaagtagcaagaagccttctgggaaactgctttgtggtgtgtttattctcctaacagagttacacctttcttttgattgagcagtttggaaacactgtttttgtagaatctgtgaagggaaacctagaagcgcattgtggcctatgatgtaaaaggaaatatcttgagataaaaactaaaaagaagcattctgagaaactgctttgtgatgaacgcattcatctcacagagtcaatcctatctttggattgagcagttttgcaacactgttttttaagaatcttagaagagatatttgagagtgatttgaggactatggtgaaaaggaaataccttcagataaaaactataaagaaactttctgggaaactgctttgtgatctgtgcaatcatcttctcacagagttaaaaattgcttttgattgagcagtttggaaacaatgttcttgtaggatctgtgaagggatatttagcagtgcttcaaggcctatggtgaaaaaggaagtatcttcagataaaaactagaaagaagctttctgagaaactattttgtgttgagtgcattcatctcacagagttaaagctttattttgattaagcagtttggaaaaactgttttggtagaacttgccaaaggatattttggagcactttgaagcttatggtgaaaaaggaaatatcttcacataaaatctagaaagaagctttctgataaattgctttttgatgattgcattcatcttcttttgatggagatggattcatccatcttctttcgatggagcagttttgcaacagtgtttttgtagaatctcagcagggatatttgggattgcattaaggactaaaatgaaaaacgaattatcttcagataaaaactagaaagaatccttctgggaaactgctttgtgatgtttgcattcatctcagagagttaaacatgtcttttcattgagcagttttgaaacactgtttatgtagaatctgcaaagggatatttgggagcacattgaggctttgggtaaaaaagaaaatatcttcagataaataatataaagaagctttctcagaatctggtttgtgatgtgtgcattcatcacacagagttaaatctttcttttgactgagcagttaaaacgctttttgtataatcggtgaagggatatttgggagcacattgaggactatggtaaaaaaggaaatatcttcagataaaaactagaaagaatcttactcagataatgctttgtgatgtgtgcactcttctaacagagttaaacctttcttttgattgagtagtttggaaacactgttttcgtagaatgtgtgaaaggatatttgggagtgctttgaggcctatggtgaaaaaggaaatatcttcagataaaaactagaaagaagctttctaagaaactgctttgtgatgtttgcattcatctcacagttaaagctttcttttgattgagcagtttggaaactgttttgctagaatatgtgaagggatatttgggaaaatgttgaggtctatggtgaaaaaacaaatatcttcagagaaaaactagaaagaagcttttggaaaaaccgttttgtgattagtgctttcatctcacagaggtaaaccttttttttgtttgagcagtttggagacactgtttttgtggaatttgtgaggggacattaaggagcacattgaggccgatggtaaaaaagcaaatatcttcagataaaaactagaaggaagctttctcagaaactgctttgtgttgtgtgcattcttctcacagagttaaacctttcttttgattgagcagtatggcagcagtgtttttggagaatctcagagggatatttcagagggctgaggactagactgagaaatgaaatatcttcagataaaaactagaaagaagctttcttagaaacagctttgtgatgagtgcattcatctcaaagagttaaacttttcttttgattgagcagtttggcaatggtgtttttgtagaatctgcgaggggatatttgggtgtgcatggaggcctatggtgaataaggaaataacttcagataaaaacttgaaagaaactttcttagaaatagctttgtgttgtgtgtattcttatcatagagccaaacctttcttttgatagagcagtttggaaacactgtttttgtagaatctgcaaaggcatatatgggagccccttaaggtttattgggaaaaaggaaataacttcagataaaattacaaagaagctttctcagaaacagctttgtgttttgtgcattcatatcacagaggtaaacctctcttttgactgagcagtttggcaacactgtttttgtggaatctgcgaagggatatttggtagcacatggaggcctagggtgaaaaagtaagtaacttcagagaaaattagaaagaagcttactctgaaaccgttctgtaatctgttctttcttcttacagagttaaacctttctattgattgagcagtttgaaaacactgttttggtagaatcaatgaagggatatttgggagcgcattgaggcctatggtgaaaaaggaaatatcttcagataagaactagaaagaagcttactcagaaactactttggtatttgtgcattcttctagcagagttgaaactgtcttttgactgagcagtgtgcaaacactgtttttgcagaatctacaaagggatataagggagcacattcaggcctatggtgaaaaagaaaatatcttcagggaaaaactagaaagaagctttctgagaaactgctttgtgatgtgtgcattcatctcacagagttaaacctttcttttaaacactgtattgatagaatctgccaagatttttttgggaatgatttcaagcctattgtgaaaaaggaaatgtcttcagataaaaactagaaagaagcttcctgagaaactgctttgtgatgagtacatttatctcacaaatataaaccattcttatgattgagcagattggcaacagtgtttttgtagaatctgattagggatatttgggatcactttgaggactacagtgaaaaatgaaatatcttcagaaaaaaactagaaagaagctatctggaaaactgctttgtgatgaaggtatttaactcacatagttaaatatttcttttgattgagcagtttgggaacagcgtttttgtagaatcagagaagggatatttgggagtgttttcatgctgatgatgaaaaaagaaatatcttcagatagaaactaaaaagaagctatcttggaaactgatttgtgatgagggtattcaactcacatagttaaacctttctgttgattgagtagtttgggaacagtgtttttgtagaatcagagaagggatgtttgggagcattttgaggccgatggtgaaaaatgaaatgtcttcagataaatactagaaagaagctttctcagaaactgctttgtgatgtgtgcattcatctcacagagttaaacttttcttttgattgaatagtttggaaacactgttttcagagaatctaccaaaggatatttgggggcacattgagacctatgctaacaaaggaaatatcttcagattaaaactagaaagaagctttctcagaaaccggtttgtgatgtgttcattcttctcagagagttaaacctgtcttttcattgggctgtttggaaatactgtttttgtagaatctgagaaatgatatttgagagtgttttgaggcctatggtgaaaaaggagatatcatcagatataaaactctaaagaaactttctgggaaagtgttttgtgatctgtgctgtcatctcacagagttaaacctttgttttgattgggaagtgtggaaacactgttcttgtagaatctgtgaagggatatttgggagcgctatgtaggcctatgttgaaaaacgaaatatcttcagaaaaaaactggaaacaagctttctgagacactgcttggttgtgagtgcatgcatctaacaaagttaaacttttcttttgcttgagaagtttggaaatactgtttttgtagaatctgtgaaggaatatttgggagcaaattgagggctatgttgaaacatgaaatatcttcagataaatactagaaagaagatttcttacaaaccattttttgatgtgaccatttttctcacagagttaaacctttctttggattgagcagtttagaaacactgttttggtagaatgtgtgaagggtatttgggagctccttgaggcctatgatgaaaaaggaattatctccagagaaaactagaaagaagctttttgagaaactactttgtgatgtgtgcattcgtcttacagagttaaacttttcttttgattgagctgtttggaaacactgttttggaagtatctggatagggatatttgggagcacattgaggcctagggtgaaaaaggaaatatcttcagattaaaactagaaagaaactttctgagaaagtgttctgtgatgagtgcattcatctcacagagtgaaaactttcttttgattgagcagtttggcaacagtgtttttgtagaatctgagaagggatatttgggagcaatttatggtctatagtgaaaaaggaaatatcttcagataaaactagaaagaaactttctgggaaactgctttgtgatgtgtgcattcatctaacagagttaaatctttattttgattgagtagtttggaaacattgattttgtagaatagtcaaagggaaatttcagagctttttgaggcctatggtgaaaaagaaaacatcttcaggtggaaacgagaaagaagtgttctgagaaactgcttttcgatgagttcatttatctcagagatttcaacatttcttttgattgagctgtttgaaaaccaagtttttctagaacctgagaagggaaatttgggagcactttgtggcctatgttaaaaaaggaaatatcttcagataaaaactagaaaaacttttataggtaactaccttctgatgtgtgcattcttctcacagagttaaacatttcttttcattcagcagtttggaaacactctttttgtagaatttgtgaagggccattttggagtgcatgaacgtctatggtgaaaaagggaatatcttcagagaagaacaagaaagaagctttcagagaaagtaatttatgatttgcacattcatctcacagagttaaacctttcttttgattgaggagttaggaaacctagtttttgtagaatctgagaaggcatatttgggagtgcattgaggcctatgttgaaaaaggaagtatcttcagataagaactagaaagaagctttctcagaaactgctttgtattgtctgcaatcttctcacagagttaaatcattttttttgattgagcagtttggaaaccctgtttttgtagaatctgccaaggcatataagggagcgccttaaggcttactgtgaaaaaggaaatatcttcagggaaaaactagaaagaagctttcttagaaattgctttgtgatgcatgcatttgtctcacagagttaaacctttcatttgattgaggctttttgaaacactgttttggaagaatctgtgaattgatatttcggagatctttgagccctttgatgaaaaaggaaatatcttcagaggaaaactgcaaagaagatttctgagaatctgctttgtgacatgtgccttcatctcacagttaaaactttcttttgattgagcagtttggaaacactgttttggtagaatttgcaaaggtatatttggaagtgcattgtggcctatggtgaaaaggaaatatcttcaggaaaaaagcagaaataaactttctgagaaattgctttatgatgagtgcattcatctcacagagttaaaccttacttttcattgagtagtttgggaacaaagtttttgtagaatctgagaaggcatatgtggcagttccttaaggcctattctgagaaaggaaatatcctcagggaaaaactagaaagaactttctgggaaactgctttgtgatgtgcacattcatctgacagagttaaaactttcttttgattgaacagtttggaatcactgttttgggggaatctgtgatgggatatttcggagctttttgaggcctatggtgaaaaaggaattatcttcagataaaaactagaaagaagctttctgagaaactggtttttgatgagtgcattcacctcactgacttaaacctttcttctgattgagcagtttggaaacactgtttttgtagtatctgcaaaaggatatttgggattgccttgatgactgtggtgaaaaatgaaatatcttcagataaatagtagacagaatctctcagaaactgctttgtgatgtgcacatacttctcacagagttaaaacattctttgattgggtggtttggaagcactgtttttgtggaatctatgaagggataatttggagcacatggaggcctatggtgaaaaaaaaatcttcagataaataatacaaagaagctttcacagaaacagccttgtgttgtgtgcattcttctcacagagttaaacctttcttttgatttagcagatcggaaacactgttttgtagaatctgcaaagacatatatgggagtgcattaaggcctattgtgaaaaagaagatatcttcagggaaaaactataaagaagctttctgagaaactgctttgtgatgtgtgcattcatctccaagaggtaaacctttcttttctttgacaagtttggaaacactgttgtggtactatctgtgaagggtatttcagagtgcattgaggagcttggagaaaaaggatatatcaacagagaaaaactggaaagaagctttccgagaaactgctttgtgatgtgtgcatttatctcatggtgtcaaacttttcttttgattgaggagtttggaaacactgttttggtagaatctgtgaagggatatttgggagctcattgaggcctttgtgaaaaaggaaatatcttcagagataagaaagaagcattcagagaaactgctttgtgatgtgtgcattcatctcacagagtaaaaccttccattgattgagcagtttggaaacactgttttgttagaatctgtgaaggaatatttggaagtgcattgtggcctattttgaaaaaggaagtatcttcagataaaaactagaaagaagcgttctgagaaactgctttgtgatgagtgaattcatctcacagtgttaaacttttcttttcattgaggagttttgggaacagtatttctgtagaatctgagatggggtattttcaagtccattgtagcctatggtgaaaaaggaaatatcttcagataaaaaatagaaagacggtttctgagaaactgctctgtgatgtgtgcattcttcttaaacacttaaacatttctttagtttgagcagtctggaaacactgtttttgtagaatctacgaaggaatatataggtgagctttgaggtccatggtgaaaaaggaaatatcttcagaaaaaaactagaaaacaggtttctgagaaatagctttgtgatgagtacattgagctcacagctgagtagtttgggaaccgcgtttttgtagaatcagagaagggatatttgggagtgttttcatgctgatggtgaaaaaagaaatatcttcagatagaaactaaaaagaagctatcttggaaactgatttgtgatgagggtattcaactcacatagttaaacctttcttttgatttagcagtttggtcactgtttttgtagaatctctgaagggatatttgggagcactttgaggctgtggtgaaaaacaaaatatctgcagataaaaactagaaagaagctttctgggaaactgctttgcaatgtgtgcattcatcttacagagttaaactttctttttctgagcattgtagaaacactgttttggaagaatctgcaaaaaaatattcaggagcacattgaggccgatggtgaaaaaggaaatatcttcagataaaaaagagaaacaagctttctcagaaaattctttgtgatgtgtgcaattgcatcagagagttaagcctttctttctgagcagtctggaaacactgctttggtagaatctgtgaagggatatttgggagcacattgaggcctatggtgaaaaaggaaatatctttatataaaaactagaaataagctttcttagaatcagctttgtgatgggtgtattcaccatatacagttaaaacttccttttgattgagcagtgtagaaacactgttttggtagaacctgtgaagggacatttggcagtgcattgaggcttatggtgaaaaaggaaacatcttcagataaaaattagaaaagagctttctgagaaactgctttgtgatgagtgcattgatctcactgagttaaaagtttcttttcgttgagctgtttggccacaatgtttttgtagaatctgagaagggatatttggaagcactttgaggccaacggtgaaaaagaaaacaattttcagattcatagaagaaggaagctttgtgggaaactgctttgtgattcgggcattcatctcactgatttaaaattttcttttgattgagctgtttggaaacactgtttttgtagaatctgtgaaggggtatttgggagaaatttgagcccaatggtgacaaaggaaatatcttcaggaaaatactgataaaaatatttaccagaaactgctttgggatgtgtgcattcttctcagagagtttaaccttgcttttgattgagcaatttggaatctctgtttttgtagaatatgggaagggatatttgggagcactttaaaaactatggtgaaaaatgatatatcttcagagaaaaactagaaagaagctttatggaaactgctctgagatgagtacattcttctggcagagttagaacattattttgattcagcagtttgcaaacacagtttctatgaaatctaccaagggatatttgggcgtgtattgaggcttacagtgaaaaaggagatatcttcaggtaaatatgagaaagaagattttcagaagctgctttgtgatgtgtgcattcttctgacagagtttaatctggcttttgattaaacagtttagaaacactgtttttgtagaatctgtgaagggatatttgagagcccttcgaggactacagggaaaaaggaaatatcttcagataaaaactagaaagaagcgttctgagaaactgctttgtgatgtgtgcattcaccatatagacttaaaacattcttttgattgaccagtttggaaactctgtttttgtagaatctgcacagagatatttgggagcgcctttaggacaatggggaaaaaggaaatatcttcacataaaactagaaaaagactttctgagaaactgcttggtgatgagtgactttaactcagagagctaaacctttttttggttaagaagtttgacaaaattgtttttgccgaatctgcaaaaggatatttccgagtgcattgaggcctatggtgataaaggaaatatcttaagattaaaactagaaagaagctttctcagaaactactttgtgaattgtacattcttatcacagagttaaacttttattttgattgagcaatctagaagacctgtttttgtaaaatctacaaagagttgtatgggagggcctagaggcttatggtgaaaaaggaaataacttcagaggaaaactagaaagaagttttctgggaaactgctttttgatgtgtgcatttatctcacagagttaaacctttcttttgattgagcatttggcaactccatttttgtataatctagaagggatatttgggagcactttgaggcctattttccaaaagaaatatcttcaggtaaatactagggagatatttgccgggaaacggctttgtgatttgtgcattcatctcaaggagttaaatggctttgggatgtgtgccttcttctcaaagagataaacttttcttttcatggagctgtctggaaacacagattttgtagaccctacaaggattatatgggagcacatttaggcctgtggtgaaaaaggaaatatcttcagagaaaaactagaaagaagcattctgagaaactgctttgtgatgtgtgcattcatgttacatagttaaaactttcttttgattgaatagtttggaaatactgtttttgtatattctgcgaagggatatgtgggattgtattgaggcctaaggtgaaaaaggaatattttcagagaaaaacttggaagaaactttctgagaaactgctttgtgaagagtgctttcttctcacagagttaaacctttcttttgattgagcagtttggaaacactcttttggtagaatctgcgaaggaatatttgggagcactttgaggcctattgtgataaatgaaatatcttcagataaaaagtagaaagaagcctctatgaaaatgctttgtgatgtgtgcattcacctcatagagttaaacctttctttttattgagaaattttgaaatactcttttgatacaatctgtgaagggatatttgggagtgcattgaggcctacagtgaaaaaggaaatatcttcagataaaatctagaaagaagctttttgagaaactcctttctgatgaatgcattcatctcatcgagttaaacctttcttttaagtgagcagtttggaagcaacattttggtgtaatcagccaagggataattgggagcacattgaggacttaggtgataaagaaatatcttcaaagaaaaactgctttgtgatctgtgcattcacctcacaaagttaaacctttattttcattgagcagtttgggaacagtgtttggtagaatgtgtgaagggatatttgggagtgctttgaggcctatggtgaaaaaggaaatatcttcacataaaactaaaaagaagctttctcagaaactgcttctcattcttcttacagagttaaacctttcttttgattgtgcagtttggaatcactgtttttgaaatatctgcaaaaggatattttggtgtgcattgaggtcaattgttaaaaaggaaatatcttcagataaaaactagaaagaagttactcagaaatcactttgtgatatgtgcattcttctcacagagttaaactttcttttgattgagcaatttggtaacagtgtttttggagattctgagaagagatattttgaagagctttgagtcctatggtgaaaaaggagatatcctcagataataactagaaagaagattcctggaaattgctttgtgatgtgtacattcatctcacagagttaaaccattattttgattgagcagcttgtaaacagtgtttatgtaaaatctaccaagggatatttgggagcactttgaggcctacagtgaaaaaggaaatatcttcagaaaaaaaactagaaagaagcattctgagaaactgctttgtgatgtgtgcattcaacatatggaattaaaactttcttttgtttgagctgtttggaaacactatttttgtagagtctgagaagggactttttggagcactttgaggcttatggtgaaaaaggaaatatcttcagctaaatactagaaagaaactttctcagaaactgctttgtgatgtgtgcattcttctcacagagttaaacctttcttttgattcagcagtttggaaacactgtttttgcgaatctgcaaatggatattgggagagcattgaagcctaggttgaaaaagaaaatatcttcagaaaaaaacaagaaggaagctttccaaaaaagtgctttgtgatgttcgcattcatctcacagacttaaacctttcttttgattgagcactttggcaacagtgtttttgtagtttctgagcagggatacttgggagtgctttgaggtaaatggtgaaaaaaagaaatatcttcagataaaaactaaaaggaatctttctgagaaattgctttgtgatgagtgcattcatctcacagagtttaaactttcttttgattgagcaatttggcaacactgtttgtgtaaaatctgtgaagggatatttgagagtgcattgaggcctattgtgaaaaaggaaacatcagagaaaaaactagaaacaagctttctggacactgttttgtgatatgtgctttcccaatgctgtgaacatctgcttctctaggataggaatattgattatgtgaaacctccctaaatgcacgcttgtttataggctctctgcagggggaaacacatcatgtgttgttggcttattctggcatcccaacctggcattgtctttacacaatccaacatgcaattttgtatttacaataatcaggagcatttcatcttttatcctgtagcaatagtttcaggggttccccctacacatttggaagcccataaaggcatatggcaagaaaccgaatatctccagataaaagctagaaagaaggtacctgtgaaagtgtcttgtgttgtgtggattcatatcacagagttaaacatttctttgcatgtagcagttttggagcactctttaggtagaatcagtgaagaaatatttggggccatggaagcctataatgaaaacctgaacatccccagataaaaactaggatgaagctgtctgtgaaacttcttagtgatgtgtgaattcatctcacagaattaaacatttgatttcatacagcagatttgaaacacttgttggatagaatctgcgaagaggcatttggaaacccatagaggcctagggtgaataaccaaataaccacagataaaaattagatataagctatctgtgaaactgcattgtgatgtgtggattcacctcacacagttaaacatttgttttgatctggcatgttaaaaacacttttttttctaggatctgtgaatgaaagatttggagtccattgaagcctatggggaaaaaatgaatattaccagataaaaactagaaagaagctatctgtgaaactgttgaaggaagtcagagaccccaaacagagggagcagctgaagccatggcagaagaaggtggattgtgaagattttatgaacatttattagttccccaaattaataactttataattttttatgcctgtctttacttcaatctctaaacataaatcgtaaagatttcttggacatttatcacttccccaatcaatatccttgtgattacctatgcctgtctttacttcaatctcttaatcctgtcagctgaggaggatgtgtgtcccctcagaaccctatgataattgcattaactgcacaaattgtagagcatgtgtatttgaactgtaagaaatctgggcaccttggaaaaagaacaggataacagcaatgtttaggaaacaagagagataaccttaaactctgatcaccagtgagccaggtggaacagggccatatttctcttctttcaaaaacaaacgggagacatatcactgaattctttttctcagcaaggaacatccctgggaaagagaatacacacctgggggtaggtctacagacggcccccctgggtgtggtcgtcttttatggtcagtagactgttgggatgaaatagaacccagtctcccatagtgctcccaggcttattaggaagaagaaagtcccacctaataaattttggtcagaccggttgctctcaaaactctgtttcctgataagatgttatcaatgacagtggtgcccaaaacttcattagcaattttaattttgccccagtcctgtggtcctgtgatttcaccctgcctccatttgccttgtgatattctattaccttgtgaactacttgatgtctgtgacccacaccctattcctatactccccttttgaaactccctaataaaaacttgctggttttacggcttgtggagtatcacagaacctaccaacatgtgatgtttcccccggacacccagctttaaaatttctctcttttgtactctgtccctttattctcaaatggccaatgcttagggaaaatagaaaagaacctacatgactatctgggcaggttcaccggtatctggtgcccatgtagtctttcttttttcttaagtgcatgagggagcccaattccctttggtaggtgtggtgaaacgtcatcagcttggtccacagatacacgtgtttgactccctgatgagtggtgagtagtctgtgtatggtctgggttaactatgagtcatgtggagtctatgcatcatacttatctctgctatactaaactcctgttaaaacagggcggtatttgagtgcctatggaaaatatggtcactctattcagggcagtagaaaaatactgtccttggtttcctgaaaaagaaaccttaggtgtagaactatgggatcatgttggtacaacattcagggaactggtctccacagggaattatgttcccatcactgtttcgggtgactggaccttggtatgtgctgtcctgatgacataccaatcctgtggccccttacagttaccacaattttctgaatctgatgatcctccacattttcctcagccttactctcctgcacagctttcattatctgaacagcctctctctccagctactcctcccctacctgacaatgtagggaattcaatgtctaactccggtaactttgacttatggtcaccccttgatgatcttatttcttttcatgaagagccagtacgtgtaactcctgtggccctgactcacacagccaggatcctatatatgctaatccttctcttctcaaacctccagatcacctagtggctctgggaccaaactaccaaactacactttacctataattctgcaggccctgccccatccacttcagcccctcaacctcctgtcattttggttcctcaactggtcactttactgtccactcagcctgcttctctgtactcttcttcacatgtgaacaccagtaatcaccagtatacttctgctcctccaatgcccctttctcacactctcattctggtccaaccctctcaccctcagtttcccttatctacacatgcttttcctgtcacttctatgccgactccgtctcagatgcctactcatgaaacttcaatgcaatgcttattacgccaaaacaaagaaacaagtggattagatacatggacttatctggtcatgctaggcccacctaacttccaagggttacaaatgcatcattatgtacctcttactcttacatttttttaagaatttaaggatgcttgttcaagtatggtcctacttctccttatgttaaaatggttttacaaactttttgtactgagttcactttacttccttttgattgggacctgttggcaaaagctgttctaaccccagctcatcatttacaattctgtatctggtggtcagaggaggcccttttgcagactcagctaaattggagtaatggcattctaattactcaggctcagctcacaggctccaatagtttctctgatgcttatgcccaattaaactttgatgcccttaccacagaacaagtaacaaaggtgtatatgagagtttgagataaattatgcactccaggccaagcttctgtttcttttaccatggttaaacaaggtcactctgaattataccctgattttttagctaaattacaagatgctgttgaaaaatctgtctctgatgagcatgctcaaggcattctccttcgtatgttagcttttgaaaatgcaaaccgtgaatgtaaaatggccatgcgttctgtgtaatgacaaaatttacctgatcacgaggtgttgctagcatgtattaaagcttgtgaaggcattggatcagacacccacaaagctattctgtgggcatgggccatgaaggacatcaaccaaactggtcccactaattcttctcttgcagcatgctataattgtggccaacttggtcatattcgaaaaatttgtgctgttaaaaacttacaagtggccaagctggttcaacaaacacagacaaatcctgctcctattgtttgtccacgttgtcacaaaggtaaacattggcaaatatttgtcactctaagtatgatatagatggaaaccctctaccacaatgtcagggaaattgggagcagggctgatcccaggccctgacatcaaatgggacacttccaactcagaccaatgttgtgtttccacttctggtggtcccaacgcaacctgcagcacaaacaaatctacctacagccaaaccatatgggtcccagcctcttcttctgtctccgtacaatgattgtccatctccatattaaaaggtggggcagtggatctctgtagtactattcctctgaatttacttcctgattctttgcccttggttgtccccacgggggtcactggccctttacttcaaggttcggtgggcctggtgttaggtagggcatccaccactgctaaaggaatcaccattcatactggtctcattaattctgattctgttgatgagattaaattaatcatttctgccaaggtttctgtttccattccagccagtgagtcagttgctcaattgcttttactacctaatatcattttaaagatttgaaacactggttggatagaatctgcaaagggacatttggaaacccatagaggcctagggtgaataacaaaataaccacagataaaaactagaaataagctgtctgtgaaactgcattgtgatgtgtggattcacctcacacaattaaacatttattttgatacagcatgttaaaaacactcttttctagaatctgtaaaggaaagatttggagcccattgaggcctatggggaaaaaacgaatattaccagataaaaactagaaagaaactatctgtgaaactgctttgagatgtgtggattcttcttacagttttaaaactttcttttgatgcagttggttggaaacacttttttggtagaatctgagaagggacatttgcaaacccattgaggatatggtgaaaaactgaatatcccaacataaaaactagaaagaaaccgttaatgaaactgcttggtgatgggtggattcacctcacaaaggttaaccttttttttttattcagcaggttggaaacactcgttttgtagaacctgcaaaaggacatttgggagtccactgaggtctatgttgaaaaatggaatatcgccagataaaactagaaagaggttatcaatgaaactgtattgtgatgtgtcgattcttctcacaaagttaagcatttcttttgattcagcagcttggaaacactttttgtagaagctgcaaagggacatttgagagcccatagaggtctatggtgaataaccaaatatcttgaggtgaaaactagaaagatgctatctgtgaaactgctttgtgatatgtggattcatctcaaaaagttaaacatttcttctgattcagcaggttgcaaacactttttttgtaaaatcagtgaagggacttctggagccctttgaggcctactgtaataaaccaaatatttccataaaaaaataagagagaaactatctgtaaaactgctttgtgatgtgcttattcatctcacagagttacacctttcttttgatactgcagcattgaaatacactttagtattcaccaatctgtgaatggacattttggagcccttagaggcctatggtgaaaacccaaatatatccagataaaaacttcaaagaagctatctgtgaaaattctttgtgatgtgaggattcatctcacagagctaaaactttctttttcttcagaagtttggaaacattattttggtaaaatctgtgaagggacacttgggagcccattctgaaaaattgaatatccccagaaaaaaaaaacccaaaaatctatctttgaaaatgctttgtcatgtgtggattcatctcaaagagataaacctttttctaattcagcatgttggaaatgctctttggatagaattacaaagggaaagtttggagcatatagaggcctatatagtggtgaaaacttaatatccccagataaaaactacaaggaagctatcattgaaagtgctttgtgatgtgtggattcaactcacaaaattaaacttttctttttgattcaggagtttgcaaatacttcctttccagagtctgggaagggatatttgagagcccattgatgcctatggtgagaaactgaatatcaacagataaaaactagttagaagctatctgtgaaactgctttgtactgtgtggattcatcttacagagttaaacatacgttttgattctggaggttggaaagacacttcaggtagaatctgcgaagggacatttgggagcccattgacgctgatggtttaaaactgaatattccaaggtaaaaactataaaaaacaatctttgaaactgcattgagatgcgtggattcatctcagagttcaacttttcttttgattcagcaggctgcatacacttttttggtataatctgtgcagggacatttgggagccctttcacacctgtcatgaaaagccaaataatcccaaataaaaactagacagaaactacctatgaaactgtattgtggtgtgtggattcatctcattaatttaaacctttcttttgatgctgcagattgaaaaactcttttggaagaatctgcaaagggacatttggaagcccatagaagatgattgacaaaaaccaaatattccaagatgaaaactagaaacaagctatatttaaagctgtattgtgatgagcagcttcatctcacagagtcaaacctttctttggaaacagcaggatggaaactctctttttgtagaatcttcaagggacatttgggagcccttttaggcctatggtgaaaaaccaaatatccccagacaaaaactagaaacaagctatctgtgaaactgctttgtgatgtgtggattcatgtcacagatttcaacctttcttttcattgagcgagctgaaaacactctttttttttttttttggaatctgcaaagggaaacatgggagcccataaaggcctgtggtgaaaaactgaatatccccagatgaaaactagaaacaagctgtctgtgaaactgcatggtgatgtgtgatttatctcccatagttaaacatttcttttgattcagcaggttgcaaacactgttttagtagaatctgtcaaggtatatttgggagcctattcaggcctatggtgaaaaaccgaatactttcagaaaaaattctgaaagaagctatctgtgaaactgctttttgatgtgtggattcatctcacagagttaaacatttctttagatacagcagttttgaaatattctttaaatagaatctgtgaagagacgtttttaagcccctataggcctaagttgaaaaacagaatattgccagataaaaactagaagaagctatctgtgaaactgctttgtgatgtacggattcatctcacagaattaaacctttcttttgattcagcagcttggaaatacttttttggcacaatatgccaaggtacatatgggagccctttgaagcctatggtgaaataccgaatatctccggataaaaactagaatgaagttatctgtaataatagtttctgacgtgtggattctttgcagagtttaaagtttatttgattcagcaggttgcaaacactcctttgctagaatctgcagagggacattccaagtctactgtagcctatggagtaaaacagaatatcccaggataaaaactagaaagaagctatatgttaaactgctttgtgatgtgtggattcatctcacagagttaaaggtatcctttgcttaagtagcttgcaaacactccttttgtaggatctgccaagggacatttggtagtactttgagaactgtagtaaaaaaccgaatatcctcagataacaacaggaaagcagctatagttacaactgccttgtggtgaacgcattcatctcacacagttaaacctttcttttgatttagctgtggttgaaaacactctttttgtagaatctgagaagggatctcagggagcccattgaggcctttggtgaaaaacaaaatatccccagaataaaattagaaagaagctatctgtgcaattgctttgtgatgtgtggattcatctcacagttttaaaactttcctctgatttaacggctggaaaccctatttttgtagaatctgcaaagggatatttgaagtccctttgaggcctcttgtgaaaaactgattatccccagataaaaacaagaaagaagctatctgtgaaaccactttgtgatgtgtggattcatctcacagagttaaacctttcttttaattcacctatttgcatacactccttttgtagaatctgtgaatgaatagttgggagcccatttcagcctatggtgaaagttaaaatatccccaggtaaaaactagaaagaagttaactgtgagactgctttgtgatatgggaattcatgtcacagagttaaacctttgttttgactgagcatgttggaaataatcttttggcagaatctgttgaggtacattagggagccctttgcaggttatggtgaaaaacaaaatattcccagataaaaagttggaagaagctatctgtgaaactgctttgtgatgtgtggattcatctcacagagttaaacctatctttgattcagcagtatgaaacactctttcacagaatctgcgaaaagacattagaaggcgaatgaagcatacagtgaaaaaccgaacatccccagataaaaactagaaaagagcaatctgtgaaactgctttgtgaagggtggatgcatctcacagagttataccattcctttggttgggtaggttgcaaatacttcttttgtagaatctgcaagggacattcaggagcccatcgaggactatggtgaaaaacaaatttccccagataaaaattcgaaagaaactatctgtgaaactactttgtgatgtgtggattcatctcaaagagttaaacccttctttagtttcagcaggttggaaacactcgttctgtagaatctgcaaagggacatttgtgagtcaattgagccttatgatgaaaaaccgaatatacgcagataaaaactggaaagaagctatctgcgaacctgctttatgatgtgtggattcaactcacagtgttaaacctttcttttcattcagcagcttgcaaatactctttttgtagtatctgaaaagggacacttaggagccctttgaagactgtagtgaacaacttaatatcttcacataaaaaccagaaagatgctatccgtgaaactgcttttttgatgagtggattcgtctcacagagttaaacctttcctttgattcagcaggttggaagcactcattttgtagaatctgcaaaaagatattttgaagcccattgtggcatatagtgaaaaacccaatatccccagataaaaactagaaagaagctctttgtgaactgctttgtgatgtgtggattcatctcacagaggtaagcctttctttcaatttaccgtgttggaaacactcttttggtaaaatctgcaaagggatatttgggagccttttgtggcctatcgtgaaaaaccaaatgtccacaggtaaaaacactcattttgtataatatgctaagtgatatttggaagcccattgaggcctatggtgaaagagagaatatcaccaggtatctgtgaactgctttgtgacgtctggattcatctcaaagagctacaactttccttaatacagtgtgttggaaacactcttttcgtagaatctgcaaagccctttgaggcctatggtgaaaaaccaaatgtccacaaataaaaactagaaaggagctatctgtgaaattgctttgtgacgtgtagatttctctcaccaagttaaagctttcttttgatacagcaggattgaaacactctttagctagaatttgtgaagggacatttgaaagcccatagaagccattgttgaaaaacagaatatccccagataaaaaccagaaataagctatctgtgaacctgcttttttatgtgtggaatcatctcagagagttaaacctctcttttgattcagcaggttgtaaacatctgctagtatctgagaaaggacgtttgtgagcccaatgtagcacactgtgaaaaattgaatattcaaagataaaagctagaaagaagcttttagtgaaactacttagtaatgtgtggattctactcacagagtgaaacttttctattgttcagcagtttggaaacactcgtttggtaaaatcaggaaattgacatgtgggagcccattgagacctatggtgaaaaaccgtatactcccagataaaaacaataaagaagctacctgtgaaactgctctgtgatgtgtggattcatctcacagagtcaaacatctattttgattaagcagtttggaaacacttgtttggcaggatctgtgaagggagatttggaaactttttgaggtctatggtgaaaagcagaatatccacagatgaaaacaacaaagcagctatctgtgaaatggctttgtgatgtgtgtattcatctcagagggataagcctttgctttgattcagcaggtgggaacactcgttttgtagaactgtgaagggatattttgaagcccatttgaggcctatggtgaaaaaacaataaccccagttcaaaactagaaggaagctacctgtgaaactgctttgtgatgtgtggattcaccactcagatttaaacctttcttttgatacagcaaatttgaaatactctttaggtagaatatgtgaagggtcatttgggagcccatggggacctagggtgaaaaaataatatccccagataaaaactagaaagaagctatctgtgaaactgctttgtgatgtctgtattcatatcacaaagttaaaactttctttgattcagcagttacaaacactctttttatagaatctgcgaaggtacatatgggaaccctttcaggaatgtagtgaaaaaacaaatacacacagatacaaaccagaaagaagctatttgtgaaactgctttttttttttttgtggattcatctcatggagatgaatttcctttgattgagcaggttggaaacactctttcatataatctgaatggggcattttgaagccctttgaggactatggttaaaaaaaaaacacagtatccccagataaaaactaggaagaagctatctgtgaacttttttgtgctattttgagctatttgtgaaactgttttgtgatgagtggattcttctcacagagttaaaccttttcttttattaaccaggtttgaaacactcttttggtagaatatgggaagggaggtttggaatccaatagagaactatggtgaaaaaatatccccagatgaaaactagaacgaagctctctgtgaaactgcttagtgatatgtagattcatctcaaagggttaaacttgtttttgattcactaggttagaaacactctttttctggaacctgcaaagggacatttatgagcccactgtagtctatcgtaagaaaccaaatatcccaagatcaaaactagaaagaggttatctgtgaaacttctctgtgatgtgtggattcatcccagagagttgaacctttcttttaattcagcaggttgcaaactgtacttttgcagagtctgtgaagataattttgaaagccgtttgagtcctttggtaagaaaccatatgtccacagataaccactaggataaaagtatctgttaagctgctttgtgatacgtggattgatctcacagagatcaacatttcctttgattcagaaggttggaaacactcgttttgtagaatctgcatggggcattttgaagccctttgaagcctatttaaaaaaatacaatatctccagataaaaactaggaagaaggtatctgtgaacttctttgtgatgtgtggattcatctcacagaggtacatgtttcttttgttatagcatgttggaaacactgttttcatagaatctgcaaagagaaatttgagagctttttgtggcccatggtgaaaaaccgaatgttcacggatgaaaactagaaagaagctatctgtgaaacagccctgtcgtctgtggattcatctcacagagataaacctgtctattgaatcagcaagttgcgtacactctttttatagagtctgcaaagaaattttgggagtccattgaggcctatgatgaaaaacgaatatccccagataaacactggaaaaaaaagtgatctgtgaaactgctttgtgatgtgtggattcatctcacagggttaaacctttctttggatttaacaggttggaaacactctttggttagaatttgtgaaggaacatttgggagcccctggaagcctatggtgaaaaacaaaatatccccagattaaaaccaggaagaagctgtctttgaaactgctttgtgatgtgtggattcctctcaaagacttaaatctttctttttactcagtatgttggaaacactcttttgctagaatctgcaaaatgagatttgtgagcccactgtagtctagggtaaatatatatatatgtatttcaagatagaaactagaaagaagatgtcagtgaatgtgctttgtgatgcgtggattcatctcacagagttaaaattttattttgattcagcaggttggaaacacctttttgtagaatctgccaacagaaatttgagagacctttgaggcctagaatgaaaaccagaaaatccccagataaaaactagaaggaagctctttctgaaactgtttgggatgtgtttattcatctaacagagttaaacttttctgtcaatatagcatgtttgaaatattttttagatagaatctgtgaagggacatttaagagcctatataggcctatgatggaaaacagaatatcccaagataaaaactagaaaaaagctaaatatgtaactgctttgagatgtatggattcaactcacagagttaaacatttctttaaacacagcagctatgaaacactttttagttagtatctgtgaagggacatttaagagcccgtagatgactacagtgaaaaactcaataacttcagatgaaaactagaaagaaaccatctgtttaactgatatgtaatgtctggatttatctcagagagataaacatttctattgatttagcaaattggaatcactcttttggtagaatctgccaagtgacatttgggatcccatggaggcctactgtgaaaaactgaatataccttgataaaaactagaaagaagctatctgtgaaactgcattgtaaagtgtggttttaggtcacagagttaaacatttcttttgactcatcaggtaagaaacactcgttttgtagactctgtgaagagacattttggagcccattgagtcctatggtgaacaacataatatttccagataaaaaccagaaggaagctatctgtaaaacccctttgtgttgtgtgcattcttcttacagagctaaacctttattttgattgaacaatacggacacacagtttttgtggaatctacgatgggatatatgggagcacattgagacctacagtgaaaaaggaaatatcttcagagaaaaactagaaagaagctttctaagaaactgctttgcaaagtgggcattcatctcacagagttaaactttcttttgattgagcagtttggaaacagtgttttggtagaatctgcaaagggttatttgggagtgcattggagactatggtgaaaaaagagatatcatcagagaaaaaccagaaagaagctttctgagaaactgctttgtgataagtgcattcatctcacagagttaacactttcttttgattgagaagtttggcaacaccgtttttgtagaatctgagaagggctatttgggaatattttgaggcctatggtgaaaaaggaaatatctacagaaaaatactagaaggaagctttctcagaaatccctttgtgatttgtgcatccatctcacagagttaaacgtttcttttgattgagcagtttggaaacactgtttttgtagaatctgcaaagggatatttgggagtgctttaaggactgtggtgaaaaaggaaatatcttcagaaaaaaacaaaaagaagcttcttgagaaattgctttatgatgagtacattcatctcacagaattaaacccttctattgaatgagcagtttggatacactgcttttgcagaatctaaaaagggatatttgggagcacattgaagcctatggtgaaaaataaaatatctaaagaaaaatactagaaagaaactttctcaaaaatcccttagtgatgtgtgcattcttctcacagaattaaaccttgcttttgattgagcagtttggaaacactgtttttgtagaatctgtgaaaggatatttgggagcgctttgaggcctatggtaaaaaagaaagtgtcttcagataaaaactacaaagaatcttctcagaagctgcattgtggtgtgcgcattttctcacagagttaaatctttattttgattgagcaaattggacacaccctttttatggaatctaaaaagggatacttgggagcccattgggccctagggtgaaaaaggaaatatattcagagaaaaacagaaagaagctttctgagaacactgttttgtgatgtgtgcattcacctcaaagagttaaacatttcttctgattaagaggtttggaaacactttttttgtagaatctgcctagggaaatttgggagtgcattgaagcctatagtgaaaaagaaactatcttcagaaaaatactagaaataatttttctcagaaatccctttgtgatgtgcacattcttctcacagaattaaacttttcttttgattgtgcagtttggagacactatttttgtagaatctcagaagggatatttgagagctctttaaggcctatggtgaaaaagaaaatatcctcagggaaacactagaaaaaaaaatcctgagaaattgctttgcaaagtgtggattcatatcacagagttaaacctttttttgattgagcagttgtaaacactgttttggtggaatctgcaaagggatatttgggagtgccttgaggcccaaggtataaaaggaaatatctacagatcaaaactagaaaagctttctgagaaactgttttgtgatgtgtgcattcatctcacagagttaaacctttcttttgattgtgcagtttggaaacactgtttttgcataatctgtgaagggatatttcagagcactttgaggcctatggtgaaaaaggaaatatcttcacataaatactagaaggaagctttctgtgaaactgcttttggatttgggcattcatctcacacatttaaacgtttcttttgattgggaagtttggaatgactgtctttgtagaatctgtgaagggctatataggagtgcttcgaggcctatggtgaaaaaggaaatattttcagaaaaatactagaaagagactttctcagataccactgtgtgatgtgttctttcttttcacagagttaaatgtttcttttgattgagcagtctggaaacactgtttttgtagaatctacataggtatgtattggagcacatagaggcctatggggaacaaggaaatacgttcagagaaaaactagaaagaagctttctgagaaactgctttgtgatgtgtgaattcatgtcagagttaaactctttttttttgattgagcagtttggcaacactgtttttgttgaatctgaaaagcaatatttgggggcgcattgagtcctatgccaaaaaaggaaatatcttcagataaaaactagaaagaagctttctgagaaatggctttgtgatgtgcgcattagtcccactgagttcagcctttcttttgattgagctgtttataaacactctttttgtagaatctgcaaaaggatctttgggagtgctttgaggcttatggtgaaaaaggaaatatcttgagaaaaactaaaaagaagctttctgagaaactgctttgtgatgagtgcattcatccctcagaattaaacttttctatttactgagcaatttggaagcactgtttttgtagagtctgcaaagggatacttaggagctccttgaatcctatggtgaataaggaaacatcttcagataaatactagaaagaagctttctcagaaacccgttggtgatgtgtgcattcttctcacaaagttaaacctttccttgattgagcaatttgtaaacactgtttttgtagaatgtgtgaaaagatattttggagcaaattgagttctatggtgaaaaaggaaatatcttcagaaaaaacgagaaggaagctttcacagaaaccaccttgtgatgtgcacattcatcttatagagttaaaactttgttttcatttagcagtttggagacactgtttctgtacaatctgcaaagggctatttgggagcttattgagacctatggagaaaagggaaatatcttcagagatgaattagaaagaagctttctgagaatctacttggtgacaagtgaattcatctcatggagttaaacattccttttgattgagcagtttggcaacagtgttttgtagaatctatgaagggatattttggaacacttagaggcctatggtggaaaatgaaatgtattcagagaaaaactagagagaagctttctgagaaactgctttgtgatgagtgttttcctctcacgaattaaaacgttcttttgattgagcagtttggaaacactgtttctgtaaattttaccaaggtgtatttgggaacgcattgagacctatggtgaaaaaggaaatatcttcaaataaatactagaaagaagctttctgagaagctgctttgtgatgagtgtattcaccatatagagttaaaactttcttttgatagagcagtttggaaacactgtttctgtaaattttaccaaggtatacttgggagcacattgaggcctatggtgaaaaaggaaatagcatcagataaaaactagaaagaagctttctgagaagctgctttgtgatgtgtgtattcatgatacagagttgaaacttagtttggaaaaactgtttttgtaggatctgcgaagggatgttgggagcatattgaagcctacagtgaaaaagtaaatatcatcagataaaaactagaaagaagttttctcagaaactgctttgtgctgtgtgcattttctcacagagttaaacctttcttttgattgagaagtttagaaatactatgttggtaggaaattcaaagggatatttgggagcgacttgaggcctatgttgaaaaaggaaatatcgccagataaaaactacaaagaagttttctcagaaacttctttgtgttctctgcattcttctcacagatttaaaactttcttttgattgagcagtttggaaacactgtttttgtagaatctgcaaaggcatatgtgggagcccattaagacttactgtgaaaaaggaaatatcttaagggaaaaactagaaacatgctctctgagaaactgtttgtgatgtgtgcattcatatcgcagagttaaacttttcttttgctaggacagttgggaaacactgttttggtagaatctgtgaggggatgtttgggactgcatagtggcctatggtgaaaaatgaaatattttcagataaaaagtagaaagaatctttctgagaagctgctttgtgatgaatgcattcatctcagagggtttaaactttctttgactgagcagtttggcaacagtgtttttgtagaatctgagaaggaatatttgggagcgatttgaggcttatgttgtaaaaggaaatatcttcagataaacactgaaacaagctgtctgggaaacatttttctgatgtgttcattgatctcacaaagttaaacctttcctttaattgagcagtttggaaactctgttttggtagtatccgtgtagcaatatttgggagctcattgatgcctatggtgaaaaaggaaatatcctcagataaaaatgagaaagaagctttgtcagaaactgctttgtgatgtgttcattcttcccacatagttaagcctttcttttgagttagcagtgtggaaacactgtttttgtagaatctacaaaaggatataagggagcctattgaggcctatggtaaaaaaggcaatatcttcaaattaaaactagaaagaagtattctcagaaaccactttgtgatgtttgctttcttctcacagtgttaaatctttattttaatgatgagtagtttggaaacactgttttggtagcatctgtgaagggatatttgggagctgtttgagtcctatggtgaaaaatgcaatatcttcagataaaaactagaaagaagctttctcagaaacagctttgtgatgtgtgcattcttctcacagagttaaatctttcttttgattgatcagtttggaaacactgttttggtagcatctgtgaagggatatttgggagctctttgagaactatgtggaaaaaggaactctcatcagatgaattctagaaagaacctttctgagaaacagctttgtgatgagtgcatttgtcttaccaagttaaacctttcttttgattgagcagtttggaaacacagtatttgtagaatctgataagggatatttgggagcattttgaggcctaaggtcaaaaacgaaatatcttcagataaaaactagaaaggagctttattttttaatactttaagtttcagagtacatgtgcacaacgtgcagtgttgttacatatgtacacatgtgccatgctggtgtgctgcacccattaaatcgtcatttagcattaggtatatttcctaatacaatccctccctcctcccccaccccacaacagtccatgttttgtgatgttcccctttctgtgtccatgtgttctcattgttcaattcccacctatgagcgaggacatgtggtgtttcgttttctgtccttgcgatagtttgctgagaatgatggtttccggcttcaaccttgtccctacaaaggacatgtactcattattttttatggctgtatagtcttccacggtgcatatgtgccacattttcttaatccagtctatcattgttggatatttgggttggttccaagtctttgctattgtggatagtgctgcaataaacatgtgtgtgcatgtgtctttttagcagcatgatttataatcttttgggtatatacccagtaatgggatggctgggtcaaatggtatttctagttccagatccctgaggaatggccacactgacttccacaatggttgaactagttaatagtcccaccaacagtgtaaaagtgttcttatttctccacatcctctccagcacctgttgtttcctgatttttaataattcccattctaattggagtgagatggtatctcattgtggttttgatttgcatttctctaatggccagtgatgatgagcatcttttcatgtgtcttttggagattgcaaaaattttctcccattctgtgggttgcctattcactctgatggtagtttcttttgctgtggagaagctctttagtttaattagatcccatttgtcaattttggcttttgttgccactgcttttggtgttttagacatgaagtccttgcccatgcctatgtgctgaatggtattgcctaggttttcttctaggatttttatggttttaggtctaacatttaagtctttaatccatcttgaattaatttttgtataaggtgtaaggaaggaattcagtttcagctttctccatatggctagccagttttcccagcaccatttattaaataaggaatcctttccccatttcttttttttgtcaggtttgtcaaagaccacatagttgtaggtatgtggcattatttctgagggctctgttctgttccattggtcaatatctctgttttggtaccagtaccatgctgttttggttactgtagccttgcagtatagtttgaagtcaggtagggtgatgcctccagctttgtacttttggcttagcattgacttggcaatgcaggctctttcttgggtccatatgaactttaaagtagtttttttccaattttgtgaaaaaagtcattggtagcttgatgggaatggcattgaatctataaattaccttgggcagtatggcgattttcatgatattgattcttcctacccatgaatatagaatattcttctatttgtttgtatcctgttttatttcattgagcagtggtttgtaattctccttgaagaggtccttcccatcccttgtaagttggattcctaggtattttattctctttgaagcaattgtgaatgggatttcacgcatgatgtggctctctgtttgtctgttattggagtataagaatgcttgtgatttttggacattaattttgtatccaggaattgaactcagctctgcaccaagtggacctaatagacatctacagaactctccacccccaaatcaacagaatatacactcttttcagcaccacaccacacctattccaaaattgaccacatagttggaagtaaagcactcctcagtaaatgtaaaagaacagaaattataacaaactctctctaagaccacagtgcaatcaaactagaactcaggattaagaaactcactcaaaaccgctcaacttcatggaaaatgaacaacctgttcctgaatgactactggctacaaaacaaaatgaaggtagaaataaagatgttctttgaaactaatgagaacaaagacacaacataccagaatcactggtacatatttaaagcactatgtagagggaaatttatagcactaaatgcccacaagagaaagcaggaaagatctaaaattgacatcctaacatcacaattaaaagaactggagaagcaagagcaaacacattcaaaagttagcagaaggcaagaatcaactaagatcagagcagaactgaaggaaatagagacacaaaagacccttcaaaaaatcaatgaatccaggagctgttttttttaagagatcaacaaaattgatagaccactaacaagactaataaagaagagaggagaatcaaatatattcaataaaaaatgataaaggggatatcaccaccaatcccacagaaagacaaactaccatcagagaatactataaacacctctaggaaaataaactagaaaatctagaagaaatggataaattcctcaacacatacactctcccaagactaaaccaggaagaagttgaatctctgaatagatcaataacagactctgaaattgaggcaataattaatagcttaccaaccaaaaaaagtccaggaccagatggattcacagccaaattctaccagaggtacaaggaggagctggtaccattccttctgaaatgattccaatcaatagaaaaagagggcatccggcctaactcattttatgaggccagcatcatcctgatgccaaagccgggcagagacacaaccaaaaaagagaattttagaccaatatccctgatgaacattgatataaaaatcctcaataaatactggcaaagcgaatccagcaacacatcaaaaagcttatccaccatgatcaagtgggcttcatccctgggatgcaaggctctttcaatatatgcaaatcaataaacataatccagcatataaacagaatgaacgacaaaaaccacatgattatctcaacagatgccgaaaagacctttgacaaaattcaacaactctgcatgctaaaaactctcaataaattagatattgttgggacgtatctcaaaataataagagctatcaatgacaaacccacagccagtatcatactgaatggggaaaaactggaagcattccctttgaaaactggcacaagacaaggatgccctctctcaccactcctattcaacatagtgttggaagtgttggccagggcaattaggcaggagaaggaaataaagggtattcaattaggaaaacaggaagtcaaatggtccctgtttgcagatgacatgactgtatatctagaaaaccccattgtctcagcccaaaatctccttaatctgataagcaatttcaggaaagtctcaggatacaaaatcaatgtacaaaaatcacaagcattcttatacacccataacagacaaacagagagccaaatcatgagtgaactcccattcacaattgcttcaaagagaatgtgtttgctttgcttttctagttcttttaattgtgatgttagggtgtcaattttggatctttcctgctttctcttgtgggcatttagtgctataaattttcctctacacactgctttgaatgcaacccagagattctggtatgttgtgtctttgttctcattagtttcaaagaacatctttatttctgccttcatttcgttatgtacccagtagtcattcaggggcaggttgttcagtttccatgtagttgggtggttttgagtgagtttcttaatcctgagtcctagtttgattgcactgtggtctgagagataatttgttataatttctgttgttttacatttgctgaggatagctttacttccaactatgtggtcaattttggaataggtgtggtgtggtgttgaaaaaaatgtacattctgttgatttggggtggagagttctgtagatgtctattaggtcctcttggtgcagagctgagttcaattcctgggtatccttgttgactttctgcctctttgatctgtctaatgttgacagtggggtgttaaaatatcccattattattgtgttgaattataagtctctttgtaggtctctaaggacttgctttatgaatctgagtgctcctgtatagggtgcaagtagttagctcttcttgatgaattgatccctttaccattatgtaatggccttctttgtctcttttgagctttgttggcttaaagtctattttatcacagactaggattgcaacccctccctttttttttgttttccattttcttggtagatcttcctccatccctttattttgagcatatgtgtgtctctgcatgtgagatgggtttcctgaatacagcacactgatgggtcttgactcttaatccaatttgccagtctgtgtcttttaaatagagcatttagcccatttacatttaaggttaatattgttatgtgtgaatttgatcctgtcattatgatgttagctggttattttgcttattagttaacgcagtttcttccttgcctcgatggtctttataatttggtgtgtttttgcagtgactggtaccagttgttcctttccatgtttagcgcttccttcaggagctcttttagggcaggcctggtggtgacaaaatctctcagcatttgcttgtctgtaaagtattttatttccccttcacttatgaagcttactttggctggatatgaaattctgggttgaaaattcttttctttaagaatgttgaatattggcccccactctcttctggtttgtacagtttctgttgagagatgatctgttagtctgatcggcttccctttgtgggtaacccgacctttctctctggctggccttaacattttttccttcatttcaactttggtgaatctgtcaattaagtgtattggagttgctcttctggaggagtatctctgtggtgttctctgtatttactgaatttgaatgttggcctgcctggccaaattggggaaattttcctggataatatcctgcagagtgttttccaacttgattccattctccccatcactttcaggtacaccaatcagatgtagatgtgggcttttcacatagtcccatatttcttggaggctttgttcatttctttttttttttttcctctaaacttctcttctcgcttcatttcattcatttgatcttccatcactgataccctttcttccagttgattgaatcggctactgaggcttgtgcatttgtcacttagttctcgtgccatggttttcagctccatcaggtactttaaagacttctctgcattggttattctagttatacatttgtctaatcttttttcaaggtttttaacttctttgctatgggttcaaacttcctcctttagctaagagtagtttaatcatctgaagtcttcttctctcaactcatcaaagtcattctctgtccagctttgttccattgctggtgaggagctgcgttcctttggagaaggagaggcactctgatttttaatattttcagtttttctgctctgtttttccccatctttgtggttttacctacttttggtctttgatgatggtgatgtactgatggggttttgttgtgaatgtcctttctctttgttagttttccttgtaacagtcaggacccccagctgcaggtctgtgtgagtttgctggaggtgcactccagacctcgttgcctgggaatcagcagcagaagctgcagaacagaggatattggtgaacagcaaatgttgctgcctgatcattcctctggaagtttttttacagaggagtatccggctgtgtgtggtgtcagtctccccctactgggggatgcctcccagttaggctacttggggttcagggacccacttgagtaggcagtctgtccattctcagatatcaagctgtgtgctgagagaacaactactctcttcaaagctgtcaaacagtgatatttaagtctgcagaggtttctgctgcattttgtttggctatgccctgcccccagaggtggagtctacagaggcaggcagacctccttgagttgtggtgggctcctcccagttcaagcttcctagccactttgtttacctacttaagcctcagcaaagccccctcccccagcctcgttgctgccttgcagtatgatctcagactgctgtgctagcaatgagtgaggctccatgggcatgggaccctctgagccaggcatgggatataatctccttgtgtgctatttggtaagaccatcggaaaagcacagtattagggtgggagtgacccgattttccaggtgccctctgtcacctctttccttggctaggaaagggaattccctgaccccttgcacttcctgggtgaggtgatgccttgccctgctttggttcactctcagtgcactgcacaaattgtcctgcaaccactgtctgatactcccccatgagatgaacctggtacctcagttggaaatgcagaaatcattcattttagaaaaaggctttctgcagatgctttgtgatgtgtacattcatctcacagagttaaaccactgttttgattgagccatttggaaacactttctgtacaatctaacaagggatacttgggagcacattgaggcctatggtgaaaaaggaaatatcttgagataaaaagtagaaagaggctttctaagaaactgctttgtgatgtgtgcattcttctcaaagagttaaatcttccttttgattaagcaatctggaaccactgttttaatagaatctacaaaaggaatatatgggagtcaattgaggctgattgtgtaaaaggaaatgtattcagataaaaactagaaaggagcattctgagaaactgatttgtgattagtgcattcatctaactgagttaaaactgtcttttgattgagtaatttggaaatactgttttggtagaatctgtgaagggatacgtgggagcacattgtgacctattgtagaaaaggaaataacttcagataaaaattagaaagaatctttctgaggaaatgctttgtgatgagtgcattcatctcacagagttaaacaattcttttgattgagcagtttggaaacactgtttttgtagaatctgagaagggatatttgggagcgctttgaggcctatgatgaaaaactaaatatcttcagatagaaactgaaaacaagctttctgggaaactgctttttgatgtacacattcatctcacagaattaaacctttctttggatggagcagcttggaaacactgttttggtagaatctgcaatgggatattttaaagcacatcgaggactatggtgaaaaaggaaataagttgagagaaaagccagaaagaagcttgctgaggaactttattgtgatgtgtgcattcatctcacagagttaaacctttccttttattgagaagtttggaaaaattgtattggtaaaatctgtgaaaggatatttgggagtgctctgagtcatatggtgaaaaaggaaatatcttcagataaaaactagaaagaagctttctgagaaactacttggtgatatgtacattcatctcagagttaagcctttcttttgtttgagcagtttggaaaaccacatttggtagaatctgtgaaagtgtatttaggagcactttaaggtttatggttaaaatagaattatcttcagataaaaacaagaaacatgatttctcagaaaccactctttgatgtgagcattcatctcacagaattaaacctttctgttgattgtgcagttttgaaacactgttttgtcagtatctgtgaagggatatttgggagcacattgaggatgatgatgaaaaaggaaatagcttcagataaaaactagtaagaagctttctgagaaactgctttttgatgagtgcattcgtctcacagtgttaaaccttttttttattaagccatatggaaacacagtttttgtaggatcttagaaaggatatttgggagcactttgaagcctatggtgaaaaaggaaatatatttagagaaaaactagaaagaaacttcctgggtaactgccttgtgttgtgtgcattcatccaacagagttaaacctttcttttgattgagcagtttggaaacactgttttggtagtatctgtgcagaaatatttgggagcacatagaggcctatggtgaaaaagtaaatacctttagataaaaactagaaaggagctttctctggaaactgctttgtgatatgagcatccttgtcgcagagttaaacctttcttttgattgaggagtctgtaaacactgtttagtagaatctacagagggatataagggagcgtattgagacctatgttgaaacacgacatatactgagataaaaaatagaaagaagttttctgagaaactgctttgagatgagtgcattcatctcacagaggtgacctttcttttgattgagtagttttgcaacactgtttttgtggaatctaagtagggttatttgggagttctttaaggcctagaatgaaaaattaaatatcttcagataaaaactagaatgaagctttctaaaaactgctttgtgatgagtgcattcatctcacagaattaaacctttctttaatttgagcagtttggataaactgtttttgtagaatctacaaatgaatatttgggagtgctttgaggcatatggtgataaaggaaatctcctcagataaaaagtagaaggaaggcttctggataactgccttgtgatgtgtgcattcatctcaaagatttaaatgtttcttttgattgagcagtttggaaacactgtttttgtagaatgtgtgaagggatatttgggatggcattgaggcctatggtgaaaaaggaaatatcttcagataaaaactagaaagaaattttctgggaaactgcttagtgatgtgtttattctcctaacagagttacacctttcctttgattgagcagtttggaaacattgtttttgtagaatctatgaagggaaacctggaagcgcattgtgtcctacgatgtaaaaggaaatatcttgagataaaaactagaaagaagctttctgagaaactgctttgtgatgtgtgcattcatctcacagagttaaacctttcttttgtttgagtggcttggaaaaactcatgtggtagcatctgccaagggatatttaggagcacattgagggctatggttaaaaacgaaatatcttctgataaaaactagtaagaagatttctcagaaaaagttttgagatgtgatcattcatctaacagaattaaacctttcttttgattgtgtagttcagaaacactgttttgggagtatctgggaagctatatttgggagcgcttagaggcctatggtcagtaagaaaatatcttcagataacaactagaaagatggtttctgagaaacttctgtgatgtgtgcattcttccaacagagataaacctttctttagattgagcagtttggaaacactgtttttgtagaatctatgaagggatatatggatgtgaaattgaggcctattatgaaaaaggaaatatcttctgagaaaaactagaaagaagctttctgaataactgctttgtggtgtgtgcattcatctcacagaattaaacctttcttttgattgagcagtctggaaagactgtttttgtagaacaaacgtgggatttatgagactgcattgaggactagggtgaaacaggaagtatcgtcagagtaaaactagaaagaagcattctgagaaactgctttgtgatatgtgcatgcatatcccagagttaaacttttcctttaatcgaagagtttggaaacactgtttttgtagaatctgcaaagggatatttgggagcactttgtgggttatggtgaaaaatgaaatatcttcagagaaaaactcaaaagaagttctctcagaaactgctttgtgaagtgtggtttcttctcacagagttacacctttcttccaattgagcagtttggaaacactgttttggtagaatctgtaaagggatatttgggagtgcattgaggcttatggtgacaaaggaaatattttcagataaaaactagaaagaaggttcttcagaatctgctttttgatgtgctcattcttctcacagaggtaaacctttcttttgattgagcagtctggaaacactgttcttgtagaatctgcaaagtgatatacgggaaagcattgaggcctactgagaaaaaggaaataccttcagagaaaaactagaaggaagatttctgaaaaactgctatctgatgtgtgcattcttgttacagagttaaacctttctgtttattgtgcagtttggcaacacagtttttgtggaatctgagaaggaatatttgggagcactttgaggcctatagtgaaaacgggaaggtcttcagataaaaagtagaaataagatttctgggaaactgctttgtgaagagtgcattcatcacacagatttaaaactttcttttgattgagcagtttggaaacacttttttgcagaatctgggaaaggatatttgggagtgctttgaggcatatggtgaaaaacaaaatatcttcagataaaaactggaaacagtctttctgggaaaccactttttggtgtgtgcattcatctcacagagttaaacctctcttttgattgaccagtttagaaacactgtttttgtataatctgagaagggatatttggaaccacttggtgacctatggtgaaaaacaaaatatcctcagataaaaactggaagcaagcttcccaggaaactactctgcaatgtttgcattcatctcacggaggtaaaccattcttttgattgagcagttttgaaaaatgtttttggtagaatctgcaaagggatattaaggaatgcattgaagcctatggtgaaaaaggaaatatcttcagagaaaatctagaaagaagctttctgagaaactgctttgtgaagtgtgcattcttctcacagagttaaacctttcctttgattaagcagtttggaaacactgtattggtagtatctgtgaagggatatttgggagcactttggggcctatggtggaaaaggaaatatcttcagataaaaactagcaagaacctttctgagaaactgctttgtgatgtgtgcattcatctcacagatttaaacctttcctttctttgaggagtttagaaaaactcttttggtagaatctgcgaagggatatttaggagcacattgagggctatagttaaaaaagaaatatcttcagataaaatctaggaagacagtttctgagaaactgctttgtgttgtgtgtattcatctcacataattaaacctttcttttgattgtgcattttggaaccatggttatgggagtattgcaaaaaaagatatttggatcacattgaggatgatggtgaaaaaggatatatcttcagataagaactagaaagcagctttgtcagaaaccacattggatgtgtgcattcttctcacagaattaaatgtttcttttgattgtgccctttcaaaagtctgttttggtagcatctgcaaaggaatatttgggagtgctttgaggcctatggtgaaagacaaaatatcttcagataaaaactagaaaacagattcctgataaactgcttggtgatgagtgaattcacctcacagaattaaacttttcttttgattaagcaggttggaaacactgttttggtagaatttgcaaagggatatttgggagtgcattggggcctatggtgaaaaagttaatatcttcacatagatactataaagaagctttctctgaaactgctttgtgatgtgtaccttcttctcaaagagttaaacttttcttttgattcaggctttggaatcactgtttttgtagaaactgtgaaaggatatttgggagtacatgaggcctatggtgaaataagttatagcttcagataaaaactacaaagaagctttctcagaaacagctttgtgttatgcacattcttctcacagagttaaacctttttttggattgaatagtttggaaacacagattttgtagaatctgcaaatttatatttgggagcacattgaggcttatggtgaaaaagaaaatatctgcagataaatactagaaagaacctttttcagaaaccagaaactgctttgtgacgtgtgcatttttctcacacatttaagcctttttttttgattgagcaatttggaaagactgtttttgtagaatctgtgaagggatattttggaacacattgaggcctacggttaaaaaggaaataatttcagagaaaaaatagaaaaacctttctgagaacctgctttgtgatgtgggaattcttctcacagagctaaacccttcttttgattcagcagtttgtaaacagttttggtagaatctgggaagggatatttgggagcgtattgaggccaatggtaaaaatggaaatatcttcagataaaaactagaaagaagctttcttagaatccactttgggatgagtgcattcatctcacagagttaaaactttcttttgattgagcagtttgtcacactgtttttgtggaatcttgaaagggatatttggctgtggtttgaggcctatggtgaaaaatgaattactttcagataaaaactagaaagaggcattctgggtaactgccctgtggtgtgtgtattcatctcacagagttaaacctttcctttgattgagcagtttcacaacagtttttttgtagaacctgagatgggatatttaggagaactatgaggcctatggtgaaaaatgaaatatcttcagataaaacaagaaagaagctttctgggaaactactttgtgacgtgtgcattcatctcacagagttcaacctttcttttgattgagcagtttggaacactgttttgatagaatcaggaaagggaaatttgggagtgcattcaggcctagggtgaaaaaggaaatatattcagataacaactagaaagaagctttctcagaggccattttgtgatcttttcattcttctcacagagttaaaccttttcttggttgattgctctggaaaaactctattggtagaatttttgaagggatatttttgagtgcattgaggcctatggtgaaaaaggaaatatcttcagataaaaaatagaaagaagctttctgggaaactgctttgtgatgttctcattcttctcacagagttaaacctttcttttgattgagcaggctggaaacactgtttttgtaaaatctgcaaagagatatttgggagcacattgaggcctatcatgaaaaaggaaatatctttagataaaaacttcaaagaagctttctcataaaccacactgtcatgtgttcattcttctcacagagttaaacctttcttttgattgagccatctggaaaaactgttttggtaaaatctgcaaagggatatttggaagtgcattgaggcctatggtgaaaaaggaaatatcttcagataaaatgtagaaagaagatttcacagaaactgctttgttatgtgtgtattcttttaacagagataaacatttcctttgattgaggagtttggcagcacactttctgtggaatctgagaagggatattttggagctatttaaggcctagggtgaaaaaggaaatatcttcagataaaaagtagaaagaagctttctgcgaaactgcttcatgatatttgtattcatctcacagagttaaacttttcttttgattgagcagtttggcaacagtgtttttgtagaatctgagaagagataattgacagtggtgtgaggcctatggagaaaaaagaaatatctacatataaaactagaaagaagctttctaggaaactgctttgtgatgtatgcattcgtgcacagtgttaaatctttcttttgcttgagaagttttgtaacactgtttttgtagtatctacaaaggaatattttggagcacattgctgcttaagttgaaaaacgaaatatctacagattaatactagaaagaaggtttctcacaaactgctttgtgaagtgtgcattcttctcacagagttaaacctttcttttgatcaaacaaattggaaacactgtttttgtagaacctgtgaagggatattttggagcacttataggcctacgctgaaaatggaaatatcttcagataaacactagaaagacgttttctcagaactactttggatgtgtgcattcttctcatagatttaagcctttcttttgattgagcagtttggaaacactgtttttgtaggatctatgcagggatatttgggagagcattgaggcctatggtgaaaaactaaatatcttcagataaaaaagaaaaacaagctttctgggaaacggctttgtgatgtgtgcattcacctcacagaattaaacttttttttgattgaacagtttgaatatactgtttttgtagaatctgtgaaggtatatctgggagcagttggaggcctactgtgaaaaaggaaatgtcttcagacaaaaagtagaaggaagatttgccaaaaactgctttgtgatgtgtgcattcttctcacagtgttaaatcattcttttgtttgagcagtttgggaaactgttttggtagaatctgtgaagggatatttgggagcaccttgtggcctgtggtgaaaaaggaaatatcttcagagaaaaactagaaagaagctttcagagaaactgttttgtgttgggtgcattcatctcacagagttaaacttttcttttcattgagcagtttggaaacactgtttttttagaatcttcaaagggatatttgggagccattagaggcctatgttgaaaaacaaaacatatttgagaaaaacctgaaagaagctttctgagaaactgcgttgagatgggtgaattcgcctcacagatttaaacttaaattttgattgagcagtttggaaaccctgttttggtagaatctgtgaatggatttctcagagcacttttaggcctatgataaaaaaggaaactttttttatcagggtttttgtgaaatctgagaagggatatttggaaacatttagaggcctatggtgaaaagtgaaatatcttcagagagaaacaagaaagaagctttctaagaaactgctgtgtggtgtgtgcattcatctgacacagttaagcctctcttttgattgagcagtttggaaattcagtttttgtagaatctttgaaaggatatatgggagagaatggaagtctatggtgaaaaaggcaatgccttcagagaaaatctagaaagaagctatctgagaaactgctttgtgaggagtgcattcatctcacagatttaaacctttcttttgattgagcagttttgaaacactgtttttgtagagtctgcaaaaggatatttgggaatgctttgaggcctatggtgaaacaggaaatatcatcagataaaaactagaaagaaggtttctgagaaactgctttgtgatgagtacattcatctcacagagttaaacctctctttggattaagcagttggaaagagtgtttttgtggaatctgagaagggatatttgggaacatttaggggcctatggtgaaaaattaagtatcttgagataaaaaccagaaagaaactttctaagaaacttctttgtgatgtgtgcattcatctcacagaattaaacctctattttgattgagcagtttagaaacactgtttttgtagaatctgtgaaaggatatatgggagtgcattaaagcctatggtgaaaaaggaaatatcttcagagaaaatctacagagaagctttctgagaaactgctttgtgatgtgtgcattcttctcacaatgtcaaacctttcttttgattgagcagtctggaaacattgtttttgtagaatctatgaaggggtatatgggagtgcaccgaggcctatggtgaaaatggaaatatctttgagaaaaactagaaacaggctttctgagaaattgctttgtgatatgtgcattgatctcactgaggtaaacctatcttttgattgagcagtttggaaacactgttttggtagaatctgcaaaaggatatttcagagtgctttcatacctatggtaaaataggaaatatcttcagataaaacctagaaagaagctctctgagaaactgctttgggatgagcacattcatctcacgtagtgaaacctttctttttatttagcagttttgcaacagtgtttttgtagtatctgagaagggctattttggagtgcattgaggcctatggtgaaaaacaaaatatcttcagataaaaacaagaaagaagcgttctgggaaactgctttgtgatgtgtgcattcatctcactgagtaaaacttttcttttggttgagcagtttggaaacactgttttggtaaaatctgcaaagagatatttgggagcccattgtggcctacgctgaaaaatgaaatatcttaagagaaaaactagaaagaagctttctgagacactgttttgtgatgagtccattcatttcagagagttaaacctttcctttgattgagcattttggaaacactcttttcatagaatctgcaaagggatatatgggactacattgagacctatggtgaaaaaggaaatatcttcagatgaatagttgaaagaagtttttcagagtctcctttttgttgtgtgcattcttctcacaaagttaaacctttcttttgattaagcagtttgggaacactgtttagtataatctgcaaaagcatatataggagcacattaaggtgtattgtgaaaaagaaaatctcttcagggaaaaactggaaagaagctttgtgagaaactgtttattgatgtgtgaattcatctcacagagttaacctttcctttgaatgagcagcttggaaacactgttatggtggaatctgcgaaggtatatatgggagcacattgaggcctttgatgaaaaagaaatatctacagagaaaaactagaaagaagttttctaagaaattgcttgtgatgtgtgcattcatctcacagagttaaacctttcttttgattgcagtttggaaacactgttttggaagtatctgcgaagggatgttttggagtgcattgaggcctatggtgaaaaaggaaatatcttcacataaaagctagaaagaagcatcctcagaaaccactttgtgatgtgtgcattcttctcacagagttaaatcttcgttttcatggagagtttggaaacactgttttggtagcatctgtgaagggatatttgggagccctttgaggtctattttgaaaaaggaaatatcttcagataaaaactggaaagaagctctctgagaaactgctttgtgatgaatgcatttgactcgcagagataaacctttcttttgattgagcagtttggtaacactgtttttgtagactcctcgaaggcatatatttgagctcattaaagcttattttaaaggaggaaatatcttcagggaaaaactataaagaagcttcctcagaaactgttttgtgatacgctcattcttctcacagagttaaaactttctttttattaagcaatctggaaacaatgtttttttagaatctgcgaagggatatttgggagctccttgaggcttttggagttaaaggaaatatcttcagagaaaaactaaaaagaagctttctgagaaagtgctttgtgatgagagcactcatctcacagagttaaaacgttcttttgattgagcagtgtggaaacactgtttttgtagaatctgtgatggaatatttgggagtgcaatgaggcctatgctgaaaaaggaaacatcttcagataaaaacctgaaagaaactttttcagaaactgttttgtgatacatgcattcttctcaaagaattaaacctttctttttattgagcagtttggaaacactgtttttgtagaatatgccaagggatattcgggaacatattgatgcctattgtgagaaaggaaatatcctcagataaaaacaagaaagattgtttatgagaaactgctttgtgacatgtgcattcttctcacagagttaaacctttctttagattgagcagtcaggaagcactgtttttgtaaaatctacgaagggatatatgggtgcacattgaggtctatggtgaaaaaggaaattccatcagagaaaaactagaatgaagctttttgagaagctgctttgtgatgtgtgcaatcatctcacagagttaaagttttagtttgattgaccagtttggaaacactgattttgtagaatctgtaaaaggatatttgggagcacattaaggcctatggtgaaaaaggaattatcttcagatgaaaactagaaagatgctttcttgagaaactgatttgtgttgtatgcattcatctcacagagttacatctttattttgcttgagcagtttggaaatactgttttgttagaatctgcaaagggatatttgggagcttcttgaggcctatggtcaaaaaggacataacttcagatagaaactagaaagaagaatttgacgcactgctttgtgttgtgtgcattcatctcacatagttaatgctttcttttgattgagcagcttggggagactgtttttgtagaatctgtgatgggatatttggaagtgcattgaaatctatggtgaaaaaggaaatatcctcagaaaaaaagtagaaatatttctgagtaacagttttgtgagttgtgcactcatctcacagagttacacctttcttttgattgagcagtttggaaacactatttttgtagaatatgcaaagggatatttgagaatgtaataagacctatggtgaaaaaggaaatatcttcacataaaaattaggaagatttctgagaaacagccttgtgatgtctgctttcatctcacagtgttaatcccttcttttgattgaggagcttggaaagacttttttgtaggatctgcaaaatgatatttgggagcacgtagaggcctatggtgaaaaagataatatcttgtgatgaaaactagtaagaagctttctgagacactgctttgtgatgtgtgcattcatctcaaagatttaaacctttcttttgattcagaagtttggcagcactgtttgtgtagaatgtgaaagagatatttgggagtgtattgaggcctatggtgaaaaagtaaatatcttcacaaaaaaagagaaagacccttgctgaggaactgctttgtgatgtgtgcattcatctcacgcagttaaatctttcttttgattgagcagtttggaaaactgtttttatagactctgtctagggacatatgggagtactttgaggcttagagtggaaaaggaaatatcttcacataaaaactagaaggaagctttctcagaaactgctttgtgatgtgtgcattcatctcacagagttaaagttttcttttgattgaccagtttggaaacactgattgtgtagaatctgcaaaaagatatttgggagtgccttgagggctatggtggaaaacaaaatatcttcagataaaaactagaaagttgctttctgagaaactgctttgtgatgtttgcattcatctcacagagttaaacctttctttggattgagcagtttgcaaagactgcttttgtagaatctgcaaagttgtatttggcagcacattgaggcccacagtgaaaaaggaaatatcttcagataaaactagaaagaagctttgtgaaaaactgctttgttacggatgcattcatctcatagagttaaacctttctactgattgagcagtttggaaacactattttggtagattctgcgaagggatatttgggaatgcactgaggcctattgtgaaagaggaaatatcctcagataaatctggaaagttttcagataaatactagaaagtatcttttggaggaactgctttgtgatatgtgcattcatctcacagagttaagctttattttgatttaccagtttggaaaaactgattttgtagaatctgtgaagggatatttggtagcatattgaggcctacagagaaaaaggaaatatcttcagataaatctagaaagaatctttgtgagaaactgctctgtgatgggtgcattcatctcacagggttaaacctgtcttctgtttgagccgtttggaaacagtatttttgtagaaactgcaaaggaatatttgggcccactttgaggcctatgatgaaacaggaaattccttcagataaaaaccagaaagaagctttctgagaaactgctttatgatgtatacattcatctcacgaattaaagctttcttttgattgagctatttggaatcagcatttttgtagaatctgcgaagggacattttggaatgcaatgaggcctatgttgaaaaaggaaatatcttcacataaaaactagaaagaagtttctgattaactgctttgtgatgtgtgcattcatctcacccagataaagctttcttttgattgagcatcctagaagcactggttttgttgaatctacaaagggataatttggagcacattgaggcctatggtgaaaaaggaaatttcttcagataaaaacaagaaagaatgtttctgagaaactgatttgtgatgtgtgcattcatctcacagagttaaacttttctcttgattgagattttggaaacactgtttttatagaatctgtcatgtgatatatgggagtgcactgaggcctatggtgaaaaaggaaatttcctcagataagaagtagaaagaagctttctgattaacagctttgtgatgtgtctattcatctcacagaattaaaactttctattgattgagcatcttagaaacactgtttttgtagaatatttgaagggatatatgggagcatgttgaagcctatggtgaaaaagaaaatatcttcacataaaaactagaaagaaactttctgagaaactgctttgtgatgtgtgaattcatctcaaagagttacacctttcttttgattgagcagtttgtaaaaactatttttgtagaatctgctagggatatttgggaacatattgaggcatatggcgacaaaggaaataacctcagataaaaagtagaaagacttctgagaaacagctttgtgatgtatgcattcatcccacagagttaaattattcttctgattgagcactttgaaaacactgtttttgtaaaatctgtcaagggatgtaagggagcacatagaggcctatggtgaaaaaggaaatttccacagataaaaattagcaggaagctttctgattaacatctttgtgatgtgtctattcatctcacagagttaaacttttctattgattgagcatcttggaaaaactgttttcatagaatctgtctagggacatatgagagggtatcgaagcccatggtgagaaggggaatatcttctcataaaaactagaaagaaactttctcagaaactgctttgtgatgcattcattcatctcacagtgttaaacctttgctttgattgagcagtttggaaacactgttttttttagaatctgaaaaaggatatttgggagtgccttgaggcctgtggtggaaaaggaaatatcttcagataaaaattagaaagaagctttttgggaaacttctttgtgatgtgtgcattcatctgacagagttaatccttccttatgattgagcagtttggaaagtagaatctgcaaaggtatatttggtagcatattgaggcctactgtgaaaaaggaaatatcttcagataaatctagatagaagctttgtgaataactgctttgtgatgagtgcattcatctcacagagttaagcctttcttctgattgagtagtttggaaacactatttttgtatattctgtgaagggatatttgggaacgcatttaggcttatggtgaaaaaggaaataacctccaataaaaactagaaatatttctgagaaacagctttgtgctgtgtgtctttatctcacagagttaatcctttcttttgattgagcagtttggaaagtgtttttctagaacctgcaatgggatactttagaatgctttggtgcctatggtgaaaaaggaaatatcttcagataaaaactagaaagaagctttctgagaaacagctttgtggtgtgtgcattcatctcacagagttaaaactttcttatgattcaggagtttggaaacactgtttttgcataatccttgaagggatgttaaggaatgcattgaggccatgttgtaaaaggaaatatcttcagataaatactagaaagaagctttcagtgaaactgctttgtgatgtgtgcattcatctcacagtgttcaagttttgttttgattgaccagttttgaagcactgattttgtagaatctatggagggatatttgggactgcagtgaggcctatggtgaaagaggaaataacttcagatgaaaactagaaagaatctttctgtgaaactgctttgtgatgtgtgcattcatatcacagattaaaacctttcttttgattgagcagtttggaaaccctgtttttgtagaatctgtgatgggatattagggagtgccttgaagtgtatgttagaaaaggaaatatcttcagataaaaactagaaagaagtttttcagacactgctatgtgatgtgtgcattcatctcacagagttaatactttcttttgattcagcaattcggaaagactgtttttgtagaatctgtgaaggcatatttgggagtgcattgagtcctacagagaaaaagaaatttctacagagaaaaagaaaatatctttagataaatctagaaagaactttttgagaaactgctttgtgatgggtgcattcatctcacagagttaaacctttcttctgattgagcagtttgaaaacactgcttttgtagaaactgtgaaagaatatttgggatgctttgaggcctatggtgaaagaggaaatgcctttagataaaaactagaaagaagctttctagttttctgatgtgtgcatcatctcacacactgatgtgtgcattcatctcactgagttaaagttctctagttttctgatgtgtgcattcatctcaccaagttaaagttttctttttattgagctgtttggaaaccccatttttgcagaatctgtgaagtgatatttgggaacgcaatgaggccaatgtcgaaaaagtaaatatcttcacataaaaactagaaagaatctttctgactaactcctttgtcatgtgtgaattcgtatcatacagataaagcttccttttgattgagcatcttggaaacactttgttgaatctgcacagggaaatttttgagcacattgaggcctatggtgaaaaagtatatatgttcagaaaaaaactagaaagaagctttctgagaaactgctttgtgatgtgtgcatttatctcacagagttaatcctttcttttaattgggcagtttggaaacactgtttttatagaatctgtcaagggatatatgagagtgcattgaggcctatggagaaaaaggaaatttcctcagataaaaactagcaagaagctttccaattaacagatttgtgatgtgtccattcatctcacagaatgcaacctttctattgattgagcatcttggaaaatctgtttttgtagaatctgtgaagggatatatgggagcatattgaagcctatggtgtaaaaggaaatatcttcatataaaaactagaaagacactttctgagaaactgctttgagatgtctgcattcgtctcccagagtttaagcattcgtttttgtagaatctgtgaagggatatttgggagcgcataggagcctatggtgggaagggaaatatcctgagataaaacccagaaaggtgttttgaaagaactgctttgtaatgtgtgcattcatctcccagagttaaattttgttttgattgactggttttggaacactattttgtagaatctgtgaagggatatttgggagtgcattgaggcctatggtgaaaaaggaaatatcttcagagaattctagaaagaagctttgtgagaaactgctttgtgatgggtgcattcatatcacagagttaatcctttctcctgattgaagcatttggaaacactgtttttgtagaatctgcaaagctagatttgggaatgcattgaggcctatggtgaaaaaggaaatatcctcagataaaaactagaaagatttctgagtaacatcgttgtgatgtgtgcattcctctaacagagttaaaccttcctttttattgagcagtttggaaacactgtttttgtagaatctgtgaagggatatttcagagcacgttgaggcctacggtgataaaggaaatatctttagataaaatgtagaagaagttctctgagaaacttatttgtgatgtgtatattcatctcagagagctaaaccttttctttgattgagcagtttggaaacactgttcttgtagaatctgtgaaggcacatttgggagcgcaatgaggcctacggtgataaaggagatatcttcagataaatactggaaagaagctttctgagaagctgctttgtgatgtgtgctttcatctcatagaggtaaacctttcttttgatttagtagtttagaaacactgtttttgtagaatccacaaaggggtatttgggaacacattgaggcttacggtgacaaggaaatatcctaagatgaaaactagaaagatttctgagaaacagctttgtgatgtgtacattcatctcacagagttaaagctttcttttgatagagcagtttggaaaccctatttttgtagaatctgcaaagtgatatttggtagtgcattgaggcctatggtaaaaaaatgaaatatcctacagtataaactggaaacatactttttgacaatttactttctgatgtgtgcattcatctcacagagttttacttttctttgattttcagtttggaaacactgtttttgtagactctgccaagggatatccttgtagatataggagagcattgaggtccagtgtgaaaaaggaaatgtctccacatgaaaaccagaaagatgatttctgagaaattgctttgtgatgtgtgcattcatcaaacggagttaaaccttccttttgattgagcatattggaaaccctgtttttgtaatatctgtgaagggatatttgggagtgctttgaggcctataatgtaaaaggaaatgtcttcatatgaaaattagaaggaaggtttctgagaaactactttgtgatgtctgcattcatctcactgagttaaacctttctttttattaagcagtttggaaacactctttttttataatctgtgaagggatactttggagtgaattaaggcctacggagaaaattgaaatatcttcacctaaaaaatagacagaagctttctgagaaactgctttgtgatgtccgcattcctctcacagagtttaagctttctttttattgagtagtttccaaacacagtttttgaaacatctctgaaaggatatttggaagcactttagggaacatggtgaaaaaggaaatatcttcagattaaaagtagaaagaagctttctgagatactgctttgtgatgtgtgcgttcatctcacagagttaaatgtttcatttgattgaacagcttggaaaccctttttttctaaaatatgtgaagggatatttgggagcgaattgaagcctatggtgaaaaaggaaatatcctcagataaatacttgaaagcagctttctgagaaactgctttttgatgtgctcattcttctcacagagttaatactttcttttgatagggcagtttggagacactgtttttgtagaaactgagaaaggatatttcaaattgcattgtagcatatggtgaaaaagcaaatatcttcagaataaactagaaagaagcactgtgagacactgctgtgtgatatgtgcattcccaaaactataaacatctgcttctctgggatagggatattgatgatgataaacctccttgactgcacgtgtgtttatcaggcctctgcagggggaagtacatcatgtgcttttggctcattcttgcaccccaacctggcattgtctttacaaaatcctgcatgcaattttgtatttacaataatcaggagcatttcatattttattctgcagcaatagtttcagggggtcctcctacccatttggaagccaataaaggtgtaggtgagaaactgaatatccccagataaaaactagaaagaatctatctggaaagtgctttgtgttgcatggattcatctcacagagcgaaacatttcttttcatgtagcagttttgaagcactctttaggtagaatcagtgaagaaacatttggggccatggaagcctataatgaaaaactgaatatacccagataaaaactagaatgaagctgcctgtgaaacttcttagtgatgtgtgaattcatctcacagacttaagcctttcttttcatacagcaggtttgaaacactcataggatagaatctgcaaagggacatttggaaacccatggaggcctatgttgaataactaaataaccccagataaaaactagaaataagccatgagaaactgcactgtgatgtgtggattcacctcacacagttaaacatttcttttgatttaggatgttaaaaacactcttctctaggatttttgaaggaaagttttggagcccattgaggcctatggggaaaaaatgaatattcccagataaaaactataaagaagctatctgtgaaactgctttgagttgtgtggattcatctcacagagttaaagatttttttaactcagcaggttggaaacactcattttgcaatatctgcgaagggacaacatcaaggcctatggtgaaaaacccaatatatttagataaaaactagaaagaagctatctgtgaaactgctttgtgatgtgtggattcttctcacagagttaaaactttcttttgatgcagttggttggaaacacttttttgttagaatctgtgaaggaacatttgcaaacccattgaggactatggtggaaaactgaatatcccaacataaaaattagaaagaaactgttagtgaaactactttgtgatgggtggattcacctcatagatgttaaccttccttttgattcagcaggttggaagcactctttttgtagaacctgcaaagggacatttgggagtccattgaggtctacattgaaaaaccaaatattagcagataaaaactagtaagaggttatatgtgaaacttcattgtgatgtgtggattcatctcacaaagttaaacatttcttttgattcagcagcttggaaacactctttttgtagaatttgcaatgggaaatttgggagccttttgaggcttatggtaataaaaaacgaatataaccagataaaaactaaaaagaagctatctgtgaaactcatttgtgatgtgtggatttaattcacagagtcaaacccttgttttcattcaacaagttggaaaacactctttttgtagaagctgcgaagtgacatttgagagcccatagactcctatggtgaataaccaaatatcttgaggttaaaaactagaaagatgctatctgtgaaactactttgtgatatgtggattcatctcacaaagttaaacctttcttctgattcagcaggttgcaatcactttttttgtaaaatcagcaaagagacatttggaagccctttgaggcctacagtaataaaccaaatatttctagaaaaaaaacaagagagaagttatctgtaaaactgttttgtgatgtgtgtattcatctcacagagttacacctttcttttgatactgcagtattgaaacactcttttgctagaatctgcgaatggacattttggaactcttagatgcctatggtgaataaccaaatatatccagataaaaatttcaaagaagctatctgtgaaacttctttgtgatgtggagattcatctcaaagagccaaacctttcttttttattcagcaggttggatatattattttggtagaatccatgaagggacacttcggagctcatggagtcttatgctgaaaatcagaatatccccagataaaaactagaaaaacatctgtctttgaaaatgctttggattcatctcacaaagataaacctttcttttgattcagcaggcgggaaatgctcttcggatagaattaccaagggaaaattgggagcacatagaggcctgtggtgaaaaactgaatatccccagataaaaactagaaagaagctatctgtgaaagtgctttgttatgtgtggattcatctcacaaagttatacctttctttttgattcaagagtttgcaaatacttcctttgcagaatctgcaaagggacatttgagatcctattgaggtgtatggtgagaaacagaatatcaacagatacaaactagaaagaagtgatccgtaaaactgctttgtaagatgtgttttcatcttacagtgttaaacatacgttttgattccagaggttggaaagatgctttaggtacaatctgcaaagggacatttgagagcccattgatgatgatggtttaaaaccaaatattccaagataaaactagaaaaaactatctgtgaaactgcattgggatgcatgcattcatctcacagagttaaagttctcctttgatttaggaggctggatacactttttcggtataatctgtgtagggaattttgggagccgtctcacacctgtcaagaaaaaacaaatatccccagataaaaactagacagaaactatctataaaacttaattttgatgtgtggattcatctcattgatttaaacctttcttttgattctgcagattgaaaaactcttttggaagaatctgcgaagggacatttggaagcccatagaagctgattgtgaaaaaacaaatattccaagatgaaaactagtaagaagctatatttgaaactgtattgtgatgtgtagatttatctcacagagttaaacttttctttggattcagcaggttggaaacacttgtttggtagaatctgtaaacggatatttgggagcctatagaggcctatgttgaaaaaccaagtatccataaataaaaactagaaggaagctacctgtgaaactgctttgtgatgtgtgtatccatctcactgagttaaaactgtcttttattcagtaggttgtaaaccctcttttggtagaatctgcaaagggacctatcacagcctgttgaggcctatggtgaaaaaacggatatccccagataaaaactagaaagaagctatttctgaaactgcattgtgatttgtgcatttatctcacagagttaaatgtttttattgattcagcaggatgaaaacactctttttgtagaatctgcaaagggacatttgggagttcttttaggcttatggtgaaaaactgaatacctccagaaaaaaaactagaaacaagctatctgtgaaattgatttgtgatgtgtgcattcacctcacagattttaatctttcttttcattcagtgagctgaaaacactctttttttagaatctgcaaagggacacatgggaacccataaaggcctatggtgaaaaattgaatatccccagataaaaagtaggaacaagctgtctgtgatactgcattgtgatgtgtgatttatctcacataggtaaatatttcttttgattcagcagattgcaaacactgttttagtagaatctgtggaggtacatttgggaacctattcaggcctatggtgaaaaacagtatacattcagaaaaaaacctgaaagaacatatctgtgaaactgatttttgatgtgtggattcatctcacagagataaacatttctttagatacagcagtgttgaaatattctttaaatagaatctgtgaagagacatttgtaagaccatggaggcctaagttgaaaaacagaatatcaccagataaaaactacaaagaaactatctgggacatttctttgtgatgtgtggtttcccccacagagttaaaccttctttcgatttagcacgttataaacactcttttactaggatctgtgaagggaaatttgtgagcccattttagcctatgttgaaaaactgaatatcccaagataaaaagataaaaaccagaaagaagctattagtgaaattgttttggatgtgtggattcatctcacagacttaaatctttcttttgtttaagcaggttttaaacacttttggtagaatctgtggagggacatttgggagcctattaagtcctatagtgaaaaaccgaatatccccagattaaaactagaaagaagccatctgtaaaactgctttcttatgtgtggattcatctcacagagttaaaactttctgtcaattcagcaggtttgaaataatctttttgtagaagctgtgaaaggacatttgggagccctttgtgaataaccaaatgtccccagataaaaactaggaagaagttattggtgaaaccgctttgagatgtgtggattcatctcaaagttacatttttcttttcccagcaggtgcaaaacaatttttggtagaatctgcgaagggacatttcagagcccataaagtcctatgatgaaaaacaaattatccccagataaaaactagaatcaagctatctgtgaaataactttgtgacatgtagattcatctcagagttaaacttattttttgattcagcaggtgggaaaaactcttttggtaggatttgcagagggacattttggagcccattgagacctatgttgtaaaacaaaatatccctagatataaactagaaagaagatctcatgaaacagcattgtgatttgtggattcatctgacacagttaaaaatttcttttgattcagcagtttggaaacactgttttggtagatcctgtgaagggacattttggagccctttgaggaatatggtaaaaaacataatttccccagatatattaagaggaagctaactgtgaaagtgctctgggatgtgcgtattcacccaagacttagacctttcttttgattcaggatgttggaaacactcttttggtagaatctgcaaagacatatttgggaacccattgaggcttataatgaaaaaatgaacattcaaagacaaaaactacaaagaagctatatgtgaaactgctttttgatgtatggattcatctcacagaattaaacctttgttttgattcagcaggttggaaacactattttggcataaattgccaaggtacatatgggagccctttgaagcctacagtgaagtgctgaatatctccagataaaaattcgaatgaagctatctgtaaaagtagtttctgacgtgtggattctttgcacagagttaaaagtttctttgattcagcaggttgcaaacactcctttgctagaatctgtgaagggacattccgagcccactgtagcctatggagaaaaatggaatatcccaggataaaaactagaaagaagctatatgttaaactgctttgtgttgtgtggattcatctctcagagttaaaggtatcttttgattacgtagcttgcaaacattccttttgtagaatctgtgaagggacatttggtagcactttgaggggtgtagtaaaaacagagtatccccagataaaaactagaaagcagctatagttataactgctttgtgatgtgtggattcatctcagagagttaaacctttttttgattcagcaatttgcatacaattcttttgtaggatctgtgaaggaatattttggagtccattttggcctatggtgaaagatcaaatatccccagataaaaactgaaagaagttaactgtgagactgctttgtgatatggggattcatgtcacagagttaaacatttgttttgactgagcaggttggaaatattcttttggaaaactctgttgagttacgttagggagccctttacagcttatggtgaaaaaccaaatgttcccagataaaaagttgaaagaagctatctgtgaaactgctttgtgaaagagtatgaaaacactcttttggtagaatctgtgaaaagacatttgaaagccgattgaggtatatggtgtaaaactgaatatccccagataaaaactagaaaagagcaatctgtgaaactgctttgtgaagggttgatgcatctcacagagttataccatttctttgattgggcaggttgcaaatacttcttatgtagaatctgcaagggacattcaggagcccattgaggcctatggtgaaaaacaaatctccccagataaaaactcgaaagaaggtatctgtgaaactacattgcgatgtgtggattcacctcacagagctaaaccattcttttgtttcagcaggttggaaacactcgttttgtagaatctgcaaagggacatttgtgagcccattgagccttatgatgaaaaactgaatatacccagataaaaactggaaagaagctatctgtgaaactgctttatgatgtgtggatttaattcacagtgttaaacctttcttttgatgcagcagcttgcaaatactcttttttgtagaatctgataagggacacttaggagccctttgaggactgtagtgaaaaactgaatatcttcacataaaaactagaaagagctatctgtgaaactgcttttttgatgagtggattcatctcacagtgttaaacctttcctttgattcagcaggttgaaagaactcgttttgtggaatctgcaaaaagatacgttgaggtcccctgtggcatacagtggaaaacacagtattcccagataaaaactggaaagaatttctttgtgaactgctttgtgatgtgtaaattcatctcacagagttaaacgtttcttcaatttaacatgtaggaaacactcttttggtagaatctgtgaagggacatttgggagcccattgaagcctatggtgaaagacagaatatcaccaggtatctgtgaactgctttgtgaggtctgaattcatctcaaagagctaaaacattccttaatacagcatgttggacacactctttttgtagaacctgcaaagggacatttgtaagccctttgaggcctatggtgaaaaattgaatgtgcacaaataaaaactagaaatgagctgtttgtgaaattgctttgtgatctgtgaattcatctcactgagttaaacctttcttttgatacagcaggattgaaaccctctttagttagaatctgcgaagggacatttgaaaacccatagaggcctatgttgaaaaacaaaatatccccagataaaaactataaataagctatctgtgatcctgctttgctatgtgtggaatcatctcagagagttaatcctctcttttgattcagcaggttgcaaacattcctttactagtatctgagaaaggacatttgtgaggccaatgtagcctactctgaaaaattgaatatccaaaggtgaaaacaagaaagaagctatcagtgaatatgctttgtgatgtgtggattcttctcatagagttaaacttttcttttgattcaaaagtttggaaatattcttttggtaaatcagggaagggatatgtgggacgccattaaggcttatggtaaaaaaaatattcccagataaacactagaaagaagctatctgtgaaactgcttcctgatgtgtggattcatctgacagtgttaaacttttcttttgattcagcaagttggaaaccctcttttggtacaatctgtgaagggacattttgaagccctttgaggcctatggtaagacatcgaatatccccagataataactacaaagaagctatctctgaaaattatttctgatgtcaggattcatctcacagagttaaacctttattttgattcaccaggttggaaacactcgttttgtgaaaactgcaaagggacatttcagtgcccacagaggtctatgcttaaaaaaaaaaaaaaaaaccaatatccctagataaaaactagaattaagctatctgtgaaactgctccgtaatgtgtggattcatctcacagaattaaacctttcttttgattcagcaggatggaaacactcttttggtacaatctgcaaagaaaaatttgggaaccctttgaggcctgtggtgaaaaaaaatcccagataaaaactagaaataaggtgtttgtgaaactgctgtgtgatatgtggattcatctcacagggttaaacctttgttttgactcaggagttgtgaaacactttttggtagaatctgcgaagggatattttgaagcccattgaggtctatggtgaaatacaaattatccccagattaaaaaaaaaaagaagaagctatctgtgaaactgatttgtgatgtgtggattcatctcacagtggtaaacctttcttttgattcagcatgttggagacacttctttgctagaatctgagaagggacatttttgagccccctgtaatatggtgaaaaatggaatatagcaaaataaaaactagaaagaagctgtctgtgaaacttctttatgatgtgtggattcatcccccaagggttatcttttctgttgatttagcaggatgccaacactccttttgtaaaatctgcaaaggaacatttgggggtccattgtggcttatgttgcaaaaccaaatatcccaagataaaaactagaaagaagctatctgtgaaactactttgtgatgtgtgaattcatcacatagagttgaaactttcttatgatagagcagtttgtgaacactttaggtagatagaatctgtgaaaagacatttgatagccaatagaggcctacactgaaaaacagaatatgcccagataaaaactagaaagatgatatctgtgaaaattatttgtgatgtgtggatttatcttacaaagttaaacctttcttttgattcagcaggtatgaaacgctattttggtagaatctgccgagggactcttgggagacaattgaggcttattgtgaaaatcagtatgttcccagatgaaaactacaaagaaggcatctgtgaaactgagttgtgatgtttggattcatctcacagatgaatccaatcctttgattcagcaggttggaaacaaacactctttggatagaatctgtgaaaggacatttgggatcctattgaggcctatggtaaataacctaatatccccagataaaaactagaaagaaactatcagtgaatcttctttgtgatgcatggattcatttcacagagttaaaactttcttttgattcagcaggctggaaacacctttttctagaatctgcgaaggggtatttgtgagacattttaggcgtataatgaaaaactgaaaatccacagaaaaaaccataaggaagctctttgtgaaactgtttgggatgtgtttattcatctaacatagttcaacctttctgtcaatatagcgtgtttgaaaaatgttttagatagcatctatgaagggatatttaagagcccatagaggcctatggtggaaaacagaatatccccagataaaaagtagaaaaaagctaagcatataactcccttctgttgtatggattcatctcacaaaattaaacctttgttatgacacagcatgtatgaaacactctttagttagtatcggtgaagggacatttacaagcccataagggtctatagttaaaaactcagtaactccagattaaaaactagaaagaagctatctgtttaacttacttgtaatgtcaggatttttcttaaagagataaacatttatattgaatcaacaagttggaatcactctttttgtagaatctgccaacagacattatgatcccttagaggcctattgtgaaaaactgaatataccttgataaaaactagaaagaagctatctttgaaactgtattgtaaagtgtggattcatctcacctggttaaacatttccctgaattcatcaggttggaaacgcatttttgtagactctgtgatgagacattgtggagcccattgagtcctatggtgaacaacccaatatttccagataaaaacctgaaggaaactatctgtgaaactgctttgtgatgtgcaattcatctaacagatttcaactttttttttattcagtaggttggagacactcatttgtagaatcagcaacaggatatttcagaacccattgaggcctatggatgaaaaccaaatatcccaagatcaaaactaaaaaggagctgtcagtgaaactgctttggatgttttgatttagctcacagaatcaaaactttgttttgattcatcaggctgtaaacagtcttttggtagaatctgcataggaacttatcacatcccattgaagcctaagcagaaataatggatatccccagataaaaactagaaagaagtgatttctgaaactgcattgtgatttgtgcatttatctcacaggattaaatctttctattcattcagcaggatggaaacacttgttgtagaatctgcaaagggacatttgggagcccttttaggcctatggtgaaaaaccgaatatccccagataaaaactataaagaagtgatcagtgaaactgcttttttgctgtgtgtatttatcttacagacttaaacctttcctttcattccacaggtttgaaacactcattttgcagaatctgtgaagggacattccggagcccctagaggcctattgtgaaaaagaaaatattcccagatgaaaactagaaagaagctatctgtgaagtgctctgtgatgtgtggagtcattgcacagagttaaacccttctattgatacagcaagatggaaacaatctttagatagaatctgcaaaggaacatttataagcccttagaggactatggtgaaaaacaggatatccccccataaaaactatcaagaagctatctgtgaaactgctttgttaagtgtggaatcagctcaaaggcttaaaactttcttttgaatctgcaagttgcaaacattcttttgctggaatctgtgaaggaacatttgcaagcccattgtagcacactgtgaaaaatggcatattcaaagataaaaactagaaagaagattttagtgaaactactttgtgatgtgcagattctactcacagagtttaacttttctattgattcagcaggttggaaacactcttttagtagaatcaggaaagggatatgtgggagctctttgagacctaaggtgaaaaattgaatattcccagataaaaatagaaagatgttatttgtgaaactgctatatgatgtgtggattcatatcacagagttaaaccttgtgtgggctggtagagtctcctattagaatatctggggttgccctgttgtctttatcattagactgcttggggtcagccaggagtctctcccactagaatgcatagggttgccaaggtatctctatcattacacttcctggggtcagacaggagtttcttcctttagaatccctgcaaacccccacttttctcatcgttagacttccaggggttggctgagagtctctcccactaggatgcctaaagtcaaccaggtataccaaccttagactgcctagggtcagccaggagactcttccactagaatgcatgggtttgctaaggtgtctccatcattacattgcctggtgttggcaagaagtctctcccattaaaataccaaaggccagccaagagtctctcccattagaatgcctagagtcacccagttgtctctatcagtagaatgcctgagttcagctgtgaatctctttcattaaaatgcctgagatcgtccagctgtctctaacattacgctgcttatagtcggctgggagtctctccctttagaatacctggggtcagccaggtgtctgtatcattagactgcctggggttggtgagaatctctcccattaaagtgcctgagatcacccaagtgtctttatcattacactctctgcagttggccagcagtctctcccataagaatgccacaggccacccacgtgattctaacattagactatctggggtcggccaggagtctctcccattggaatgcatgtggtcacccaggtgtctctatcattagactgcctgaagtcggccaaaggacttttccattataatgtctggggtcacccaagtatctctctaattaaactgcctgtggtcagaaagaagtctctcccattaaaatccctggggtcacccaggtttctctctccttaggctgcctagggtgggacaggagtctctgcattagaatgcctggggttggtggggagcctctcccattagaatgcctacagtcgcccagttgtctctatcattagactgcctggggtcgcctgaaactctctcccattagaaagtctgggtgcgggccgggcgcggtggctcacgcctgtaatcccagcactttgggaggccgaggtgggcggatcacgaggtcaggagatcgagaccatcccagctaacacggtgaaaccccgtctctactaaaaatacaaaaaattagccgggcgtagtggcgggcgcctgtagtcccagctacttgggaggctgaggcgggagaatggcgtgaacccgggaggcggagcttgcagtgagccgagatcccgccactgcactccagcctgggcgacagagcgagactccgtctcaaaaaaaaaaaaaaaaaaaaaaaaaaaaaaaaaagaaagtctgggtgcgtgcaggtgtctttattgtaagactgcctggggttgaccaggagtctctcctattagaatgcctgggattgttcagatgtctctatcattagaatgcctggggccagcaagcagtctttcctgttagaatgcctgtggtggcccaactgtctctattattagactgactgaggtcagccaggagtctctccaaaaagaatgcctggggtcatcagggagtcttcctcattagaatgactttggtctcacatatttctctaccatcagactccctaagagtggctgggaatctctttcatcagaatgcctgggacacccaggtgtctttatagttagactgcatagggtaagcaaaaactctctcccattagaatgcctggtttcttctgagagtctctcccattagaatgactgtggtgacccaggtttctctataattaaactgcctggggtcggccaggagtctttcccattacaatgcctggggtctccaaggtgtctttattatttgactgactgtgctaggctgggagtctctcccatatgaatgcctgtggtggccaagttgtctctatagttagaccacctaaggtcaaacaaaagtctctcattagcatgccaggagtcacagaggtgtctatcattagactgcctggggttggctgggagtttttctcattagaatgctgaaggtcgcccaggtgtttctgtcattaggctacctggggttggccaggattttctctcattggaatgcctggagggtcgcccaggtgtctctatcattaaactgcatagggtcagcaaggagtctttcccattagaatgcctggggtcagccaagtgttttcattcttagactgcctggtgttggctaaaaggctatcccattagaatgcctggggtcccccgggagtccctcccatcagaatgcctggagccacccaggtgtgtctgtcattaaactgcctgggtttggcccggtgtctctcacattagaatgcttgggtttgcacaggtgtctcgatatttagactgcctgggctcagccaggagtctctccaattagaatatctgggtttgtccagagtctatcccattagaatgactgggatctcccaggtctctataattagacttcctgagtcagccaggagtttctcccattagaatgcctagaattgacgaggtgtctctaacattagactgcctggggttggctgggtgtctctcccattagaattcttgaggttggctggatgttactatttttagaatgcctgaggtcgcccaggtgactctattattaaaatccccaggttcggatggaagtctctcccattagcatgcccagggtcactcaggtgtctctaccatgagacttcttggggttggctgggagtgcctcccattataatgcctggggtcgcccaggtgtctctataattagagtgcctggagtcagccaggagtctctcccattaaaatgccttgggttgcccaggtgtctctattattagactgccaggggtccgacaggagttactcctgtaagtttgcctgtgatcgcttgggtatctctataattagactgcctgagaacagccaggagtctctctctccaattaaattgcctggagtcaagtgggagtccttcccattagaatgcctgtggttgcccaggtgtctctgtcattagacagcctgtagtcagccgagagtctctcccatcagaatgcctaagttcacctaggtgtctttattattacactgcattgggtcagccaagagtctctcctactagaaagcctggaatctgccaagagtctgtcccattagaatgcctgggttggtaaaggtgtctctattatataatgtctgggattggccgggagtctctcttattacaatgtctggggtcaaccaagtatctctataattacactacctggggtcgaccaggagactctcccattaaaatgcctggggtcacttaattttctctataatttgattgcctggggtcagccaggagactcttccaagaaaatgccagaggttggctgggagtctcttttattagaatgactggggtccaccaggtgtctctattattatgcaacctggggctggtcaggagcctttttcattaaaataccttgtaggggtgggttgcccctacacacctgtgggtgtttctcgtaaggtgggacgagagatttggaaaagaaaaagacacagagacaaagtatagagaaagaaataaggggacccggggaaccagcgttcagcatatggaggatcccgccagcctctgagttcccttagtatttattcatcatttgtgggtgtttctcgaagagggggatgtgtcagggtcacaagacaattgtggggagagggtcagcagacaaacacgtgaacaaaggtctttgcatcatagacaatgtaaaggattaagtgctgtgcttttagatatgcatacacataaacatctcaatgctttacaaagcagtattgctgcccgcaggtcccacctccagccctaaggcggtttttccctatctcagtagatggagcatacaatcggattttatacctagacattccattgcccagggacaggcaggagacagatgccttcctcttgtctcaactgcaagaggcattccttcctcttttactaatcctcctcagcacagaccctttacgggtgtcgggctgggggacggtcaggtctttcccttcccacgaggccatatttcagactatcacatggggagaaaccttggacaatacctggctttcctaggcagaggtccctgcggccttccccagtttttgtgtccctgggtacttgagattagggagtggtgatgactcttaaggagcatgctgccttcaagcatctgtttaacaaagcacatcttgcaccgcccttaatccatttaactctgagttgacacagcacatgtttcagagagcacggggttgggggtaaggtcacagattaacagaatctcaaggcagaagaatttttcttagtacataacgcagaagaatttttcttagtacataacaaaatggagtctcctatgtctacttctttctacacagacacagtaacaatctgatctctcttgcttttccccacatttcccccttttcttttcgacaaaaccgccatcgtcatcatggcccgttctcgatggtcgctgtctcttcggagctgttgggtacacctgcagactaacaacagacaaaacaggcacacaaggattaatatgagatttataatcgtagtacttccaatggtcttaacccaagtgacagggttaagatttgcgaggccatcagcaactcctgcaattgcctcagttcctggcaccaaatttaaatgggcttttgatgcttcgaaaatttgttcttttaatttggaaatgtctaaagtgagattatcttctcttccctgtagatggcgtctaaccatgtcccagtgatgctcagactcattataaatttggggtgtaatagaaaaatctgacgtattccagtcacattgtaactggaaacgatgttctaagctcatgagcctgtctcccatccaaatgacagtttgtctaagatcattaatttgatttgccaatttttgatcaatactagattgtgaattccacaatcttgtagaatttttttgccaatcattaacaaagtttactgactgaacagaagagtgcaatgcaactcctgctacagcagccgtagctgtgactgcaattaatcccataatcactgctattaaagtaaaaatgaatcttttggatctatttaaaacaccttttaatacttcagtcaaagtatggatggatggtgaggcctcccacggtcggtccatggacacagggatccacacgccctctcttgctctcaccagcagaatacggtgttgccaattaaaagttgaatcaatgcaagtaagcaatctacaattttcacaggttatagtctgggagtctggtttaataactatatttcctacaactagcatataagggggctttatgcaactttgtaaaggaactgttagactggaatttaggtcgacagtataaaatggcttacgatctcttgtttctaaagtttgatttccagaccaaattctaatgtggtgtgaggccacagtaagcctccataattctggatgttcaggaccagaaacaggacttattatttttggtcttggggtagagattcctttttctccccattcccaagggtagaaagactgcaattttttatgcttatgtttgtctaaactttctgttaagtcgctatcaacagctggactcacttgtgcacttggacacgactgagtttgtcctgagcaattgtggtagaattgacctcgaggtgcccaatctataatagttccaaattcattgttttgtaatatcaccgcactattggccacacattcttcccaaactaaaacttctgtattttttgattctttgggaatttccttggggcaaggtttccctttaggtctaaatttaaatgatctttgataagaaaagtcttgtaaataatttacccgtggcctgagtgacatcccgcttaccatgtgataagtgaatctactgatgggactgacagtaggtacttctaccaaccaattttggactgcaggcattaaacatcctggtgctctccctaggcaaataggaggataacgatacccaatggaaatatttatcatcatcccttcttcctcaggtttggcagggcagtgatcatctgtggggccaggtacccatacactatcattaacatatacttctataggattatccatccatgtgactgcccgaattaagggcgggaaaggcacataggcccagtaggtatagttagctgcagctgctcctgcaggcatagggagacttaccaccattgatacaatcatcaaggctgcaagcagcatactctctggggtttgtgtcacctttgtgttctctagatattttgtagctaactgcgtcagcttctttagttgtgcccaagtcggcggctctgctttcttggtggatggcaacttcatctgttcttctgacgtcaccattttgttcatcttgtgagtcaacggtgctcgattgcggtgtctccgtctccgcggaggtgcttttctttgcatctccgatgggttcattgtagaacttcaaatgtctagtgggtatccaaacaggaagctgattttctcctggtgaaacacaagcaaaacctctcccccacgttatcaccttccctatttcccatgtcttatttttattatctttccaccaaattagttttccttcatgtgggctgttctttttaccagtaagatgttgttctgcagaagtagtagtctgatttctataaatgtttaaaaaatttaaagtatagagtgctagattaagttgcatctgaggagtggtacactccttactgtctcccccttctttttgtttaactaattgagttttgagtgttctatttgttctttcaactatggcctgtccttgggaattataaggaattcctgttgtatgtgaaattttccactgacttaagaatttttggaaagctttactacaatatcctggtccattgtcagttttgattttttctggaactcccattacagcaaaacaagacaataaatgttttttaacatgggaagtactttctcctgtttggcaagttgcccatatgaaatgtgaataagtatcaactgttacatgaatatatgataatcttccaaatgaagatacatgcgtgacatccatttgccataatgcattaggacacagacctctgggattaactcctgcctcttgagtgggcaggtgtaagacttgacactgggtgcaatgttgtacaatatcttttgcctgtttccatgtgacatcaaatttgttttttaatcctgctacatttacatgagtcaaagcatgaagttcttgtgcttttatgagtgcagatgataccagtaagtcagcttgttcatttgctttagtcaaaggccctggtaaattagtgtgtgctcgaatatgagtaatataaaatggaaaatttctttttcttttttttttttttttttttttttttgagacggagtctcgctctgtcgcccaggctggagtgcagtggcgggatctcggctcactgcaagctccgcctcccgggttcacgccattctcctgcctcagcctcccgagtagctgggactacaggcgcccgccactacgcccggctaattttttgtatttttagtagagacggggtttcaccgttttagccgggatggtctcgatctcctgacctcgtgatccgcccgcctcggcctcccaaagtgctgggattacaggcgtgagccaccgcgcccggccggaaaatttctttttcttacagtttgttgtaataaattgaatagctggtttaactgatcatccatgctatatttaattagagctgtctcaacatcccttgtagcttgtactacatatgcagaatctgatataatattgataggttggtcaaaatcttgcaacactgtaatgactgcaaccaattctgctctttgagccgattgatattgagttttgattactcgttctttcggccctgtgtaagctgcttttccattgctggaaccatcagtaaatactgttagagcattttctaaaggttcacgtctggtaattttaggtagaatccaagtagtcatttttaagaactggaagatctttgtttttgggtaatgattatcaataattcccacaaaattagcaagaccaatctgccatgcaccagaattgataaaggcttgtctaacttgttccttggttaaagggacaactattttgtctgggtcatttccacataattttattattcgtaatcttgtctgaccaattaatgtagccatttgatccaagtacaatgtaaaagtcttaactgtactgtgaggaaggaatgaccactccacaagatcagtattttgaataatgatgcctgttggagaatgtgcagtggcaaaaatcaaaagttggagtgtggctaagggatctattctatttatttgcgctgactgaattttttcttccactaatttaatttcttttgttgcctctggggttaacattcttttactatttaagtctgagtctcctcttaagatagagaacaaatttgacatggcataagtaggaatgcctagagttggccgaatccaattaatatctcccagcaatttttgaaaatcatttagtgtttttaatgtgtcttttcttatttctatttttggtggcttaatttttctattttctatctgcatccctaaataatgaaaaggagtagaggtttggatcttatcagatgctattgccagtcctgcgttggcaacctctgcttgcagaaatgtataacagtcaattaatttatctttcgtttctgcagcacataaaatatcatcaatataatgaatgatataacagtctgaaaacttttctctaactggttgaagagctcgacctacaaaagtctgacaaatagttggactattaagcattccctgaggtaacactttccactgaaacctggtggctggctctttattatttatggctggtatagtaaaggcaaatttttcacaatcctgctctgccagagggatggtaaaaaagcaatcctttagatcaattataattaaaggccaatcttttgggatcatggccagagagggcaacccgggttggagaggccccatgggttgaattacggcgtttacggcatttacggcccttaagtcagttaacatacgccatttgcctgatttcttctgaattacaaacacaggagaattccaaggtgagaatgaaggctcaatatgacccttttctaactgttcatttgctaataaatgtaaagcctccagtttttgttttggtagcggccactgatttacccacactggtttttctgttttccaagttaatggtatgggtttaggaggctctacagtggccacccctaaaaaggataccctattccttctcttttttgatttattttagcctcaactggaattttaatgccatcttcatttttccctagtccctttcctggtatatatcccatcttggtcatgattttttgactcgtggggctatataatggagcaggcatggtgatttccgcaccccattgttgtaataaatctcgaccccacagattaagaggaattgaagtaatcattggctgaacagtactttcttgattatctggccctaagcaatgtaaaatctcagtactttgatacacttctgaggctgtgcctatgccgacaagtcctgtaacagccttttgtttaggccaattttttggccactgatttaaagcaatgatagagacatctgctccagtgtctaccaacccttcaaactgttttccttgaataatggccttacacacaggtctgttctctgagacctgacttgcccaatatgcagcctttcctgttggatcagtgcttccaagccctcctattctttttatttcactatttccaccctttaatatatggcaggagtaataattgagcaatcctgtctcctggactggcactccaaggaattgaagagctaataaccaactgaatttcgcctttatagcctgaatcaaccacaccagtatgaatttgaactccttttagatttagacttgatcttcccaagattagtcctacagtcccctcaggcagggggccatatacccctgtggggattttttgtgggggctcccctggaagcagagagactgcttgtatagtacataaatctactgctgcactgccgcttgtggcgggggacaattgttgtattgtggtaactggcttattccctgaaacacttgggacagtgggggttgttgtccctgaaaaccatgaggaacaaatggctgaattgggaatgccccagtttgttgtggggcctgaggctggcccctttgctcgtttcccgacaatggttgcccatttttatcaaatttagaacgacattgactagcccaatgttttccttttttacatcttggacataagtcaggtggctctctacctgttgtagttgcttgaatagttatattctgtttgtttaagactgggcaattcttttttaagtgaccaatttgaccacaattgtaacattttcctccaaatgttctgacttgtcctcctaaaacaactcctgttattgcttgagccataagcatagctttatgcatagctcctcccattccatcacaggcttttacatattctgagattacatctgatcctgcaggaacctttccttttaatggcttaatggctgattgacactcaggattggggttttcatatgccatcaactccactatgaccttacgggctttttcaatggcaattgacttttgagcaacatcttggagccttgccacaaaatcaggatagggctcttttgaaccttgtcttactgtattaaatgaggggcaggtacttcctgggtcttggattttttcccaggctctaaggcagatagctctaacttgctcaatggcctcattttgcattaatgcttgttgactaatagtactccaattttgacctattcctaatagttgatctgcatctatgttaactggaggattggcagccctatttcttcggacctgttcttgtaccccatcaatccaccaagtcttaaattgtaaaaattgagagggtgagagagacgattttgccagaatctcccaatcataaggaatgagtctatgtccatgagcaatggaatctaataatgtcctcatataaggggagttgggtccatactgttttactccctctttcatatcttttagcatttttatcgaaaaagacttgtatctggcctcaactgtgggaggctctccctcttgggctccttctccaggtggcatcggttctaacgttactgggaattgccatgcctcagtatctccttcctttcttgatttatcaataatttcatgtaattcactaccccgtctactaggtggtgccgtaggattaagtctcctagtgggcggctgagggtatggcgccctgccctgtggtgctgggggcattcctggatatccatactgactttctaggggtggccgatactgaagttcagccggcggccagtattgataggctactggcggttgggtcttattttctttaacctgcgtttgaggttgtaatgttacgggcacctgacctgctggaagacgacttgtgcctcgtggtttagactctgatggccccactaattctggaacttttccttctaattttaacgtttcaggatatatcacctcctgtaattgattatagtcaacattttgcgttgactgagccattaccggctctgctacatattcgcaatgtaaactttccgtttctttctgggattttttccttgtgttttcattacaatctattatacagcttccaggggcatcagaaactgaaacgctatcttcttctgtttgaaatggttctaaagctgctttaataatggcccaatcattccatactgtaagtggaatgatattacccttcctacctgcttgttttagttccttaccaattcttttccaatcttttagatctaaagttccttgttctggaaaccatgggcaaaattgttctattatttgaaatagcttgattagattttttgtagatactttaactccccctctttttagaagaattttaataaagctgagataagaggcatatttacttttaattttacttttagtttgccccattatcaccctagcttcttctgagcgcacaagcttactgtaaggctgactgtagacgtactcaggatctctcgtcgacttgtcctcaatgaccacgctcgagcgtaccttcaccctagagaaaagcctccacgttgggcaccagatgtaggggtgggttgcccctacaatacctgattttgtccgaaaatctattccattagaatgactagggtcacccaggtgtttctataattagactgtctgggtctgccagtagtttctcccattaaaatgcctagggtcgcccaggtgtttctataattagactgtctgggtccaccagtagtttctcccattataatgcctagggtcaacaaggtgtctctataattagacttcctggggtcagccaggagtctcccataaaaatgcctagggttgcccaggtgtttctatcattagactgcctggcatcagccagaagtctctccaattaaaatgcttgggtcactcaggtgtatctatcactagactgcctggggtcaggtgggagtttctcccgttggaatgctcggggatgaaaaggtgtctctatcattagactgcctgaggtcaaccaggagtctctcccattcaaatgcctgcatttgcccaggagtccctattcttagactgcctggggttggccaggagactctccaattagaatacctggattcctctgggagtctttcctattagaatgactgtggtggctcaggtgtctctataattacactaccttgggttggccaggagtctctccattaaaatgcctggggtcgaccatgtgtctctatcattagactacctgaggtcagccagaagtctctcccattggattgcctggggtcggataagagtctcattttttaagaatttctggggtcaccaagttgcctctatcattaaaatgcctggggtctactgggagtttctcccattagaatgtcagtggtcgcaaaggggtctctgaaattagactgtctgcagttggtcaagagtctctcccattagaatgacagtggtcttcaggtgtctctataattagaatgcctggagtcagccaggattctctgtcagtacaatgcctgggatctctcaggtgtctctataaatagaccacctgggttcggacaaaagtctctcccattagaatgccaagggtctccaaggtgtctctattattagacttccaggggtgggctgggagcctcttccattagaattctggggatcacctaggtgtttctgtcattagactacctggggtcagccaagagtctctcccattgaaatggctggggtcgcccaggtatatttatcactagactgcctggggttggccaggagcctctaccatggaaatgcctgggagtctttcccattgaaatgcctgggttggcctaattgtctttatcattaggcttcctcacttcggacagatgactctccaattagcatggctgcagtcgcccaggagtctctcccattagaatgcctggggtcagctgaaagtctcttccattagaatgtctggactctcctaggtgtctctacctttaaaatgcttgggtttagacaaaagtctctcccattaaaatgccatggctcttgaagctgtctctatcattagaaagtattgggtcagacagcagactctccgattagaaatcctagtgtcactcagatgtctctataatgagactgccctgggttggccaggagactctaccattataatacgtggggtggcccaagtgtccctataattagactgcctgtggtcaacaagttgtctctcacattagaatgcctggtctcgcccaggtgtcttcattcttagactgtcttgggtcagccaggcgcctctcccactagaatgcctggggtctgcccaaagtctctcccattagaatgcctggggtctgcccaaagtctctcccattagaatgcctggagtcacccaggtgtctctatcattagactggatggggttgggccagagtctctcccgttagaatgtctggggtcgctgaggtgtctctataattagactgcctggataaggtcaaagtctctccctttagaatatctgttgtcgcccagatgtctctatccttagactgccttggataggccagaagtctcttctattagaatgcctatggtcatcggggattctcttccattataatgactggggtcgtctaggtgtcttttttattagactgcctggggttgcccaggtgtctctaataatgaaactgcctggggccaaacaggagtctctctaatctgaatacctggaatcaaccaggtgtctctatcattagactgcattgtgtcagctgggagtctctccctttagaatgctggaggtcacccaggtgtttctgtaattagactacctaatctgcccaatggaatgtctgatgtttcccatgtgtctctatcattagactgccttgggtcggccaggagcttctcttattagaatgtctggggtcacccaggtgtctctataattagaatgcttggggtcagcaaggccctgttgaatatctggggtgggtcagttgtctccatccttagacttcctggggttagcctggagtctttcattagaatgctcggggtcagcctagattatctcctattagaatgcctggagttgcccaggtttctctatcattagactgcctggggttggccgagagtctctctcattagaatgcctggggcctactgagaatctctccctttagaatgcccaaggtcacctaaatgtctgtatcactaggctgtctggggtctgccaattgtctctccaattagaatgtctgtggtcgaccatgtgtctctatcattagactgactggtgttggccaagagtctcccattagaataccttcagttggccgtgagtctcttccattagaatgccttgggtagtccagagtctttcgtattaaaatgcttggggtttccttcttgtctctatcattagactctctcggattggacaggaaactctcccattagaaagtctgtgggctcccaggtgtctctatcattcgatgtcctgggaatgtccaagagtctctcccattagaatgcccgaagttggccggaagtctctcccgttagaatgcctgcagtcacccaggtgtctctatcaatcattagaatgcttggggttggctgggagtctctcccattaaaatgccttgggtggttcaggtgtctctatcattaaaatgaatggggtcggctggcagtgtctcccattagaacacctgatgtcaccaaggtgtctctataaagactggttttgctcggccaggtgtccttattcttagactgcctgtggtcagccagaagtctctttcattagaatgcgtggggtcaaccaaaaatctctccattataaagactgtggatgcccaattctctctataattagactgcctggggtcaaccaggagtctctcctattaaaacgcctgtggcaaaccaggtgtcttcatcattagactgcctggtgtcagcgaggagtctctgccattagaatgcttgtggtcagttgagagtcttttctgttagaatccctgggctctccaatgtgtctctgttattagaaagcctggggccatccgggagtctctccaattagaatgcctggagttgcccaggtgtctctattattagactgccagaagtcagccagaaatctctcccattagaatgcttggggtcgcccagtaggctttatttttagaatgcccatggtggggcaagagccccttccatgaaaatggctggtgtctcccaggtgtctccatcattagagtgcctgcggtcggctgaaattctctcccgttagaatccctgagatcactcaggtgtctttatcgttagactgcctgcggttggccgggagtgttttccagtagaatgtctggtgtcaaccaggagtcttactctttagattgcctgaggtcggccaggagtttcttcattagaattcctggggtcggctgaaagtctctcttattagaatgactggggttgtccaggtgtctgtatcattatagtgtcgtgggtcacccagagtgtgtcctattagaatgcctggggtcacctaggtgtctttataattagactgcttgggctcagtcagtgatctctcccattagaatgcctggtgtggcacaggtttctctattattagactgcatgcagtctgctgggagcctctcccattagaatgcctggagtcatccagggctctctagcattagacttgctgcggtcggccggaagtctccacattagaatgcttggggtcggagggagtatctcccattagaataattggtgtcgtccaggtgtctctaatattagaatgcctggagtaggccaggagtctttcactttagaatgcctaatgtcgtgaagtttctctataattagactggggtcagccaggagtctctcccaaaggaatacctggtgtctgctgaaaatttctcccattaaaatgccatcaaaatgcttgtggtcagttggaagttttttctattagaatgcctgtcatctccaaggtgtctctattattagaaagccaggggctagctgggagtctcttcaattagaatgcctggagtcatccatttgtctctatcattagaattcctgaagtcatccaggagtctctcccattacaatgacatgggtcggccaaatgtttccatcattagaatgcctgccattggccttgagtctctcccattagaatgcctgggatcacccagatgtctctatcattagactgccttggatcagccaggagtctctcccattataatgcctgggtttacttaaatgtctctataattaggctgccaggctcttccatgagtctctcccattaaaatgtctggagtcgcccaggtgtctccatctctaggctgcctggaattggccaggagtctctcccagtagaatacctggggttgtccaggtttctctatcactagtctgcctgggttcgactgggagtctcttccattagaatgcctggggttgctcaggtagctctttcattagactgcttgaggtcatccagaagtctctcccattaaaattcctaaaatcgcccaggtgtctccataattagactgccagggattggttaggagtctctcccattagaatgcctgtggtcgcccaggtgtctgtatactttgactgcctgctgttgtccaggagtctctcattagaatgcttgaggtcgtccccgagttcctcccattagaatgcctggggtcacccaggtgcctctaccattagaccacctgggttccatcggatatctctcccattacaactcctgaagttgcccaagtgtctttattattatactgccagggtttggccagaagtctccttcattagaatgcctggggatgcccaggagcctctaaccttaaattgccaggggttggcctaaatccctcccaagagaatgcttggggtcggccaaaaacctcttcaattagaatgctgtttgttgcccaggtggcccatcattagaaagcctgtgttcagctgagagtctcgcccattagaatgcctggggtaatttagatgtctgtataattagactgcctggagtcagccaggaataatacctgcatttgactgggagtctttcccattagaatgcctatggttgctcatgtttctctatcattagaatgtctgggttcggccaggagactctcccattagaatgtctgtagccacccaggtgtctctatcatttaactgcctggcatcaactgggagtctctacattagaatgccttgggtcgaccaggtgtctctattgtttgactgcctggtgtcagccaaaagcctctccattagaatgcatgggtctggccaagaatccctaccattagaattactgggattgtccgggtgtctgtatcattagactgtctggggtcggctgggaatctctcccattaaaatgcctagggtagcccaggtgtctctatcattggaatgtctggggctggccgggtgtatttcccattagaatgactgggattctccaggtgtctctatcattagactgcctgaggtcggccgggagtctctccaattagaatgactggagtcgcccaggggtctctatcactgggctgcctggggtcggccaggagtttctcccattagaatgctttgggctgactgggagtctctcccattagaacatgtagggttgcccaggtgcctctaacattagactgcctggagtcggctaggaatctctctcattagaatacctggggtcgcctaggtgtctctttaattattctaccaggaatccaccaggagtctctcgcatgagaatccctgttgttgcccatttgcctccatcattggacagcctggggtcagctgagagtctctctcattaaaatgcctggggttgcctaggtgtctctaacattagactgcctgtgttcatccaaaacttctcccgttagaatgcctgaagatgccaatgtgtgtctataattacaataccttgggtctgccaggagcttctcccattagaatgccagaggtcgcccaggtgtctattcttagacagcctgcattcagccaggagtctctcattagaatgcctggtgttggcagaaattatctttcattagaatgcctggggtcacccaggtgtctctattattaggctgtctgagtttggcagtgagtctctttcattacaatgcctgaggtcgcccaggtgtctctatcattagactgcttagggttggccaggaatctctcccattcgaattcctagtgttgcccaggtgtctgtaattagacttcctgggttcaaccaggagactctcccattacaatgcctggggttgctcaggtgtgtctatcattagactgcttagggttggctagcaattctctcccattcgaattcctagtgttgcctagatgtctctataattagactccctgggttcaaccaggtgtctctcccattagaatgcctagggtcgctcaggtgtctctatctttaaactgcctagggtcagccaggagtctcccattagaatacctggggtcgccaaggtgtctctattattagaatgactggagtcagtggggactttcacctccattagaatgcctaaggtcatctagatgtctctataattagactttctgtggtcagccaaacctctcttccaaaagaatgcctgcattcttccagaagtctctcccattagaatgcctgaagctgctcatgtctgtctgtaagtagactgcctgggtcagtcaggagtctctcccattagaatgcctgaggaccccaagctgtcactatcatgagactgcatggtgtagcccaggtgtctttatcattaaacttcctggggccagccaggagtctatttcattagaatgcctgcagtagcccaggtgtctctattgtgagacttcctagggtaggaagggagtctctcccattaaaatgcctggcgtctcccaggtgtctctacaattagtctgcctggggtcagccagtatcctctaccattagaatgcctggtgtctcccaggtgtctctataattatattgtctgagtaagctaagattctctcccatttaaattcatggggtcacccaggtttaattattcttagactgcccagtgtcagccaagagtctctggtattaggatgactgatgtcgccctggtgtctctataattacctgggtttggccaagagtctctctcattaaaatgcctaaaatcgaccaggtgtttttatcattagactgcctgcggtcggccaggggtctctcccattagaatgcctggcgtcggccaggagtcttttggattagaattactggggtggcccaggtgtctttattataatgcctagggtcttctgggagtctctcccattagaatgcatgctgtcgcccatgcgtctctatcattagactcactggggtcggctgggagtctcttttattagaatgcttggagtgggctggaagtctttcccattagaattcctgtggttggcagggagtctttcccattagaattcctgtggttggcagggagtctttcccattataattcctgggatcaaccagttgtctttatcattagaatgcctgggataggccaggagtctctcccagtagaactcctactgtcacccaggtgtctctaccattagaatgcctagggtcagccaggagtctttccaattagaattactaaaatcgcccaggggtctttattattagacagcctgggttcggctgggagtctctcccattagaatgactggcattgcccaagtgtttctatcattagactgtctaggtttggccaggagtcattcacattagaatacctgtggtcgcccagttgtctctacaattagaatgcctaggttcttccaggagtctctcccatttgaatgccttgggtcacccaagtgtttctatcattagactgccttagttctgccagaaatctcttattttagaatgcctgtggtcgacctcgagtctctcccattagaatgacttgggttgcctaggggtctctatcattgaactgcctagcatctcctgtgtgcctcttctattagaatgcctgtgtcaccctgttgttcctatctttagactgcctggggtcagacgggaatctctcccattagaaagccaggagttgcccagttgtctctatcattagactgccttgtgttatccaggagtctctcctactaaaatgcctggtgtcacccaggtgtcttcattattagactacagggtgttggccaagagttgctaccattagaatgcctggggtgggccaggagtttctcccatttgaatgcctgaggtcgtttagctgtctctgttattagactgcctggaatcgacgggaatatcttctatcagaatgcctggagatgcccaggtgtctctcttgttagactgcctgtggtcagccaggtgtctctcccatgagaatgccaggaatcgccaagttgtctctatcattagactgcttggagtcagccaggagtctctcccattagaatgccttgtgtcacccaggtgtctatctttagaatgcctgaggtcagccaggagtctctcccattagaatgcctggggtcacccaggtgtttccatcattagactgcctgtggttggctgtaaatctctatcattagaatgcctggggtcacccaggtggttctattatactgctctgggtccaccaggagtctcttccattataatgcctgggctttttcaggtgtacctataattaggcttcctgggcttgaccagaagtctctccatagaatgcctggggtcgcccagttgtctctatcattagcctgcctgtattcggctgggagcctttctaattagaatgcctggggtcgcccaggtttctctattattagaatgactgtaataaccccgtgtgtctataattagaccctcaggggtcggccaggagtctctcccattagaatgcctgtggccactcaggtgtctttatcctaacattgtctgtggtcagccacaagtctcccattaaaatgcctggggttcaccgggagtctctccgattagaatgcctggggtggatattgtgtctctatcattagactgcctgggttcaactgggtgggtctctctttaatttgcctgaggtccttaaagtgtctctatcattagattgcctggggtcacctgggagtctctcccattagaatgcctgtggtcgaccaggtgtctttattcttagacggcctggggtcgaccacgagtctttcccattagaatgactggagtcatccagaattctctcccattagaatgactgtaatcgcctggtgtctctataattaaactgcctggcattggccaggattgtcttcctttaaaatgcctggttgtgaccaggtgtctctatcattagactgcttgggcttaaccaggagtctctcctattagaatgtcttacatcacccaggtgtttctataattaattgcctggggttggccaagtatttccttcattagaatgcctgctgtcacccagatgtctctgtcaattggccctgtggggtcagccgagagtctttttcagtataatgctttgggtcacacaggtgcctctctcattagactgcctggggttgtccaggtgtctctcaaattagaatgtctgggatctcccaggtgtctctatcattagacttcctgaagtctgctggaaatctctaccattaaaatgacttgggtcacccaggtgtctctatcattaagctgcctggatttggcagtgaatccctgccattagaatacccggggtctcccgggtgtctctatcaatcgactgccagggtcagctagaagtctctcccattgtaatgacttgggtacctcagagtctctcccactaaaatgcttggggtggtccaggtatctttagcatagaatgcctgtggctggctgggagtttctcttattggaatgccaaaagtcgaccagatgtctctatcattaggcagcctgcggtcggccaggagtttctttcattagaatgcctgggctctgccgttagattgcctggcattgcaaaggtatctttaccattagaatgcctggtgtcaacctacagtctctttccttggaatgcctgaagtggctcagttgtctctatcattagacagcctgtggtcagatgggaatctctccaattagaatgcctgaggtcgttcgggtgtatctataattagactgcctggaatcagccaaaagtgggtcccaagaaaatggggtaggctgggagtctctccaatcaaagtgcctggggtgcctcaggtgcctgtatcattaaaatacttgggttagttcgggaatctctcctattagaatgcctaggatcacccagttgtctctatcattagactgcctgtggtcggccggctgtctctcccactcaaatgtctggggtcacccagttgtctctatcaatagactgcctgtggtcggccggctgtttctcccactcaaatgtctggggtcacccagttgtctctatcattagactgcctgtggtcggctggctgtctctcccattcaaatgtctgggctcacccaggtgtctctatcattagacggcctggggtcagcttggagtctcttaaattagaatgcctgtggtagccttggtgtcttataaggacttatcattagactgcctgggctctgtcaggagtctttcttgttagaatgaatgaggttgtccaggtgtctttattattagactggctggcgttgaccaggagtctctccctttagaatgcctgggatcccgcaagtgtatgtaacattagactgcctgtggtcagctgggagtctctcccattagaatgcctgagatctccaagatgcctctatcattagactgtatgcggcctttcaggaatctcccattacaatgcctggggtcagccaggagctctcccattagaatgactagggttgttcaggtgtctgtatcattagactgcctgggcttggccaggagtttctcccattagaatgcctggggttgcccaattgtgtctattattagagtgtccagggtcaaccagaagtttctcccattacaatgccttggcttgccctggtttctgtttcattagaatgcctggggtcagccagaagtctctctctttagaatgcctgacgtggcccaggtgtctctatcattagtcagcttggtcagggctaggagtctttctcattagaatgcctggggtctcacaggttttgctaatattagactgcatggtgtcaggcaagaatcttttccattagaatgcctggggctggccaatagactttcacattagaatgcctggaggcactcaggtgtctctatcattagattgcctgaggttggatgcaagtttctccaattaaaatgcctggattcgcccaggtgtctctataattggactgtctgggtttggccagaattctttcccattagaatacctggggtgggctgggcacggtggctcacacctgtaatcccagaactttgggaggccaagaggggtggatcatgagttcaggagatggagaccctcctggctaacacagtgaaactccgtctctactaaaaacacagaaacattagctgggcatggtggcaagcacctgtagtcccagttactcaggaggctgaggcaggagaatggagtgaacccaggaagcagggcctgtagtgagccaagatcacaccactgccctccagcctggggaacagaacgaaactcaaaagaaaaagaaaaaaagaaaaagtaaaagaaaaagaacacctggtgtcacctaggtgtctgtatccttaaactgcctggaataggccaggagtctttcccattaaaatgcctaggttcggccaggagtttctccaattaaaatgcctggaatcaataatgtatctctatcattagactgcctgaggtcggccaggagtttctcctattagaatgcctagtgtcagctggcagtctcttccatgactgggatagccaaggtgtctctatcattagaacgtctgagttggctcagctgtctctatcattagaatgcctgaggtcagcctaaggtctctcccattatagtctctggggtcgcccatgtgactgtatcattagattgcctgcagtcagccagtggtctctcccattagaatgtctggggttgcacttgggttcagccaggtgtctctacttttagactgcctgggataggccaggatttgttcccattagaatgcttgagtatgcccaaatgtctctatcattagaatgcctgggtgttagaaatgctcattcctttgtgctgaaaagaagaactagtgctcaaagaatgttctcagcaaagcaattttactttctgcagaaagggtgctgtccatcagcaatcctgccacgagagcacaatgaacaaagaaggacaagaatatgtatcccttatgcattgggtccttactactgtgtcctatctccattggtgggagctggacctcacagtctaaactaaacccgattgactaacaacttaaactttcctaaataggtaaaggtaatggagaacaaaaggaaaagaggaagttgcttgcaaaagaacttagaaaagtaatatttccaaataaggaaggggcataagctgtgagatggaacatgcttgagcgtgtctagaacaaatatcttggttaaagtacgaagacatagaatgtacttattccctcatgtccaacagctacataggatagggtttaataaagagttcttagtattaaagcaaggaggcttgaaggaagttagtttttaaaagaaactattatttctaacatttgttatttaacaagaagggaaactttgaagaggaactttccactttccacactggggttggtggaaagtctcttccattggaatgcatggggtttcccaggtgtatctatcattagactgcctttggtctgccttgagtctcatctgtttgaatgcttggggtcaccgaggtgtctccatcattagagtgcctggccttggtcaggagtctctcccattagaacgcctggtgtcagctgtgagtctcctattatgatgcctgcaatttcccagtgtctctatcattagactgcccagggtcaagcagaagttccttccattagaatgcctgggttctcccaggtgtctctgtcattaggccacttggggttggctaggagtctctcctatgaatatgcctgaagctgcccatgtgtctctatcattagtctgcctgcggtcagacaggagtctccatattagaattactggagtcagccatgtgtctgtatcattagagtgcctgcattcggcaagaaatctttctatttagaatgcctggggtcagcctatttagaaatctttctatttagaatgcctggtctctgccataatgatgccttgggtcacccaggtgtctctatcattaaaatgcctgtgatcagctgggagtctctcccgttagaatgcctggggttcccaggaagcagagcttgcagtgagccaagatcacaccactgcactccagtctgggtgacagagcaaggctccatctcaaaaaaaaaaaaaaaaaaaaaaaaaaaaaaagaatgcctggagttgccaaggcatttctattcttagactgcccagggtctgccaggagtctctttaattagaatgcctgaagtcagccaggagtattttcacagatagcttgtttctagtttttattgtttgatattctgtttttcactataggcctcaattggctcacaaatatccctttgtagattctacaaaaaaagtgttttcaacctggtgaattgaaaaataggttacattctttgatatgaatccataacttagcattttcacagataactttttctagttactatcatgaaatattcggtttttcactgtagtcctcaatgggaaagaaatgttgattaacagattcttaaaaaagggtgtttccaacctgttgaatcaaaacaaaagttgaagtctgtgagatgactccacatatcttcaaaacatcatgacagatagcctgtttttcattcttatctctagatatgactccacacatcacaaaacatcctcacagatagcctgtttttctttcttatcactagatattttgtctttcaccataggcctcaataacctcggaaatgtcccattgtagattctacaaaagattgtttgaaacctggtgaatcaaaacacagatgtaataccatgagctgtatccacatatcacaaaccattttcacagatagtttgtttctacattttaccacagaatattcgatttttctctatagacctcattaggctaagaaatgtctcctcatagattgtgcaaaaacagcatttacaagctgaagaatcaaaacaaagattgaactctgtgagataaatccacacatcccaaagtattttcaaagatagtttgttttaaatttttattgcaggatatctggtttttcactataggcctcagtgggctcaaaactgtccctttgcaaattctacaaaaagagtgttaccaacctggtgaatcaaaacaccggttgtttcagtgagatgaatccacaaatcattaaggattttcacacatagcttgtttctagtttttaccttgggatatttggctttttactataggatttgctgggctcagaaatgtaccttcatagattctacaaaacgattgtttccaactcgtgaatcaaaacacaggttctgttcatgagataaattcacagatcataaagcattttcacagatatcttgtttcaaatttttatggtgaaatgtttgtttattcactataggactcaatgggctcagaaatgtttcctcgttgagtctacaaaaagattgtcttcaacctgttgaatcaaagcaaaggtttaacactttgagatgaatctgcatgtcaaaagctttttcaaagatagatttttttatagtttttatcccaggatatttggttttccacaatgggtctcaatgggctcagaaatgtccctttgcagattctacaaaaagagtgtttccaaagtggccaatcaaaacataggtttaaataagttagataaatctatatatcacaaagcattctcatagatagcttgtttatacttttatcatgaaatatttctttttttactgtagggctcaatgggctgtttaacaacaggtctctaaggcctcaaaaatttcccttagtagatttcactaaaatctactcccagctgtcccttagtagattttactaaaaaagcattttcaaccttttgaattataacaaaggtttaatcctgtgaaatgaatccacacatcgaaaagcattttcacagatagctagttcctagtttcattgtgggataggtagttcctagtttcatttgtctttcagtataggcctcaatgggttcagaaatttgccttcatagattccacaaaaagaatgtttttaacttggtgaattaaaacacaggttataattggtgagatgaatccacacatgactaaggatttttgaagatggcttgtttctggtttctaccttgggatatttggtttttcaatatcagcctcaccgggctcaaaaatatccattaatagatcaaaaaaaaaaaaagaaatttcccttcgtagattccacaaaaagagtgttttaacctggtgaattaaaacacatgttctaatttgtaagatgaatccacacatgactaaggatttttgcagatagcttgatagcttgtttgtggtttctaccttgggatatttgatttttcaatatcagcctcactgggctcaaagatatacattcgtagatcaaaaaaaaaaaaaaaaaaaaaagagtgtttccaacctggtgcctcaaaacaaagctttatctttgtgagataaatacacatatcaaaaacattttcacagacagcttgcttcaagtatttgttgcgggatatatggtttttcaatataggcctcagtgggctcagaaatgtacctttctagattctacaataagagtatttaaaacctgttgaatcaaaacacaggtttaaatttgttaggcaaatgcccatattaaaaagcactttcacagacagcttgctttaagtttttatcacatgatatttggttttttattattggcttcaatatgctcaaaaatattccttcatagattgtacaaaaaaagtgtttccaaccaggtgtatcaaaacagaggttccattgggtgatatgaatccacactttgcaaagtgtttttcctgatagcttgtttccatgttccttcatagtttccacaaaaagagtgattacaaacttttgaatcaaaacaaagttttagccctgtgacatgaatccacacatggcaaagcattttcaaagatagtttctttcaaatttttattgcaaaatattcggttcttcactatttgactcaatggactgagaaatgtcccttcatagattctacaaagagaatgtttccaaccttttgaatcaaaacaaaagtttaactgtgtgagatgaatccacatattgaaaagcattttcacagcatgtttctagcttttatcacaaaatattcgtgtttttactataggcctcaatgggctcagaaatctcccttcgtatagtaaaaaaaaagtttttccaacctggtgattcaaacacatgtttccttgggtgagatgaatccacacatcacaaagcactttcacagatagcttgtttctagtatttctcagagtgtattcagttttacaccacagacctcaataggctcagaaataccccttcagagattctacaaaaagagggtttccaacctgctgaattcaaagaaaggtttcactctgtgagatgaatccacacatcacaaagcagtttcacagatagcttctttctagtttttaatcacaggatatttggtttttcactataggcctcaatgggctctgaaatgtccgttcatagtttctacaaaaacagtgtttcaaacctgtagaatcaaaacaaagttttgatgatgtgagatgaatccacacatcacaaagccttttcacagatagcttgtttctattttttatcaccagatattccctctaggccttaatcagctcagaaaggttttctcagagattctataaaaggagtgtttcctacctgttgaattaaaacaaagttttaactatgtgagataaatccacatattgtaaagcattattacagatagcttgtttctagcttttatctcaggatatttggtttttcacaataagcctcagtgggctcataaatcttcctttgtagattctacaaaaaacagtttccaacctagtgaactaaaacaaaggtttaactttgtgaaatggatctatatatcatgaagcattttcatagatatctttctcctagtttttatcatgggatatttggtttttcactaaaagcctcaatgggctcagaaatgtccttttgtagattgtacaaaaagagtttttccaacctgttgaatcaaaacacaggtttaagtctgtgagataaatccacacattgcaaaatattttcacagacaggttgtttgtagtttttatttgcggacttttttttttaactgtaggcctaaatgggcttagaaatgtttttttttcatagattctgcaaaaagagtttttgcagcctgttgaatgaaaaaagttttaaatctgtgacataaatccacacatttcaaagcattttacaggtagcttgttactggtttttatcatgggaaattcagtttttcactacatgcctttatgggctaagaaatgtttcttcttcatttccacagaaatagtgttaacgacctggtgaatcaaaatacagtttccactcgatgagatgaatctacacataacaaatcattttcacagatagcttgtttctagtttttttttttttttatcagatattcggtttttcactataagcctcaatgggctcagaaatgtctcttcatagattctacaaaaagagtgtttccaacctggtgaatcaaaacacaggtctcattcagtgagatgaattcatacatcacaaagcattttcacacatagcttatttttggttttcatcacaaaatattttgtctttcactatatactttaaagtgttcagaaatgtcccattttagattctaccaaagaagtgtttccaacattttgaaccaaaacaaacatttatcttcctgagatgaatccacatattgcaaaacattttcacagatagtttaataacagttttcatctcgggatattctgtttttcactctaagcttcaatgggttcagaaatgtccctttgtaaattctacaaaaagagtattttcaaggttttcagtaaacacaaaggtttaactctgtgagatgaatcccaactttgcatagcattttcacaaatagcttatttcttgtttttatcacaagactttcagttttttactattggcatcaatgggctcagaaatgtccctttgtagcttctataaagagggcttccaacctgttgaaaaaaaagtttaactctgtgaaataaatccacacatcaataagcgttttcatggatattttgtttctagtttctatcatgggatatttgatttatcacaatagacctcaatcagctgagaaatgtccccgcctagtttcgacaataagagtatttttaacaggttgaattaaaacaaaggtttaacgctgtgagatgaatttacacatcacaaagcattttcacagatagcttcttcctagtttctattttgtgatattcagtttctcactacaggcctcagtgggttaaggaatgtcactttgttgtttccagagaaagagtgtttttaaccccttgaatcaaagcgaaggtttaactctgtgagatgaatctacaaatcagaaagggttttcacacgtagcttgtttctagtttttatccggggatatttggtttttcacaataggcctcaacgaactcagaaatgtccctttgtagattctacaagaagaggacttctaatttggtaaatccaaactcaggttccatttggtgagatgcatttacacatcacaaaacattttcacagatatcttgtttctagtttttatcatggcatattcggttttatattgtaggcctcaatagactcagaaatattttttcacagattctacagaaaaagtgtttactaactgttgaattaaaacaaaggttcaacactgtgagatggatctgcacatggcaaaacatttttacagttagcttgtttctaatttttaatgaggaatattcagtttttcactgtaggcctcaaaggactcagaaatatcccttcgtgaattctacaaaaaaagggtttccaatctggtgaataaaaataacagtgtgacttggtgaggtaaatgcacacatcaaaaagtatttttgcagatagcttgttcccacttttcatcacaggatatttggattttcctgtaggcctcattgcgctcagaaatgtccctttatagagtgtacaataaaagtgtttccagcctgatgaatcaaaacacaggttccattcagtgacatgaatctacacatcagaaagtattttcaccaataatttgtttctagttttcattgcaaaatattctgtttttcagtactggcatcaatggtctcaaaaatgtcccttcattgatcctacaaaaaaagtgtttccaatctggtgaatcaaaaccatggtttaactcttttagataaatccatgcatcacaaagcatttttacaaatagcttgtttctcttttttattgtgtgatattcagttttttactcttggcctcaatcttcttagaaattctcctttgtgttttctataaaaaactggttccaatgtcgttattcaaaacacaggagccaatctgtgagatgaatgctcacatcatgaaacattttcacagagagagtttcttcctagttttccatatggagtattaagattttcactcttgtccttagtgggctcagaaatgtcccttcctatattctacaaaaaaaagtgtagccaacatgttgaatcaaaaaagagcttaagctctgtgagatgaatatgcacaccacaaagcatattcagaggtagtatatttttagtttttgccatgggtattcaggttttcactataggccttcatgggttcagaaatgtcccttcatagattctacaagaagagtgtttccaacctagtgaatccaaaagtggcttaaatctgtgagaataatatatatatggaaaagcattttcacagacagcttgtttctagtttttatcatgggatattcagtttttctgtataggcctcaatgggttcagaaatatttcctcatggattctataggaagaatgtttccaaactgttgaattaaaagaaaggtttaagtctgtgagattaattgatgcatcagaattcattttcacagatagcttgtttccactttttatcataagaaattcagtttttcaatattggcctcaattggctcagaaatattttctcttacattccacaggaagcatgtttccaacctgatgaataaaaatacaagttccattccttgaaataaatccacacttcagaaagcattttcacagagggcttgtttctagtgtttatcacaagacattcagtttttcactataggccaaaatgggctcagaaatgtttcttcatagagtctacaaaaagagtgcttctaatctgttgaattaaaacaccggttccattcggtgtgatgaacttgcacatcacaaagcagtttggcagatatcttgtttctagtttttattgcaggacatttgggttttttaataggcttcaatgtgcttagaaatgtccctttgtagattctacaaaaagagtgtttcaagcctggtgaatcaaaacatgagttccattcggtgagatgaatgcacatcagaaagtattttcccagataccttgtttttagttttcatcgtggttccaactggttgaatcaagaaagaggtttaactctgtgagattaatccacacgtcaccaagcattttcacagatagcttgtttagagattgtgtagcagaatatttgatttttttcctatagtcctcaatgcggtaagaaattgtccctttgtagattctacaaaaagagtgtttccaaccagataagtcaaaacacaggttttattcattgagatgaatccacacgtctgaaagcatattcacagatattttgtttctagtttttatcacaaaatattttgttttttactataggcatttatgacctcaataatgtcccttcatgggttctacaaaaagtgtttctaacttgttgaatcaaaacgaaggtttaactctgtgaaatgaatctacacacaaatccttttcacagatagcttgtttctagtttatatcatgggatatttggtttttcactatagccctccacgggctcaggattgtcccttagtagaatccacaaaaaagtgtttccaactttttgaatcaaaaaaaggtttgactctgtgagatgatttcacacatcgtaaagcattttcacaggtagcttatttctagtttttatcgcaggtattctgtttttcactatgggcctcaatgggctcagaaatattccttcatagattctacaaaaagagcatttccaaccaggtgaatcaaaacaatggtttaagtcttttagatgaatccacatatcccaaataattttcactaatagctcattactggtttttaatcatgaaatattcatattcattttttcactataggcctgaatttgctcagaaatttttttttgtggatttgattgcaaagtgtttccaacctcatgaatcaaaacacaaaatcctatgggcctcaatgagctcagaaatgtccctttgtagattctacaaaaagagtgtttccaaccaggtgaatcaaaacaatggtttaagacttttagatgaatccatacatggcaaagcatttttacagatagcttgtttctagtttttatcaggggatattcagttttttactaaaggactcaatgggttcagaaatgtgccttcatagatcctacaagaacagtatttccaatctggtgaattaaaacacacgttcccctccgtgagttgaatctacgtatctcaaatcatattcactgataacttgtctctagtttttatcacaggagattttattttttactgtaggcctccatgacctgagtaatgacccctcatagagtctacagaagagtctttcccacctgtgaatcaaaacgaaggtttaactctaattcacacatggcaaagcattttcacagattgcttgtttctagttattagcacaagaaattttgtttttcactattggcctccatgcactcagaaatgttttttcatagattcttcaaaaagagtgttaaccttttaaattaaaaaaaaaagttttgtctctgtgagattattccacacatcacaaagcattttcacagttagcttttttaaccataggcctcaaagaacccagaaatgttgcccaggtgtctctatcattagactgcctggggccaaccagggaggggtctctcccattagaatgtctggggttgcacaggtgtttctatcattagattgtctagggttgcccaggagtctctccaattagaatgcatgtgtttggctgggtgtctctcacattagcatgcctggggtttgctgagagtctctctcattagaatgcctgtggttgagtggagcctctttcattaaaatgcctgaggtcagatggaagtctcacttattagagtgtttgagatcacctgggtgtctctattataatgcctgtggttgccttggagtctttccgattaaaatgcctggggtcgccctggtgtctctaccattagacagcctgggttcaaccaggaacctctctcattagaatgcctggtgtcaccaagatgtctttatcattagactgcctgggttcagccagtagtctctccctttagaatgcctgggttccgcaatgagtttcttccattaaaatgcctgtagttgataggtgtcccgattattagacggcctgaattcggccaggagtctcttccattaaaatgtctggggtcacccaggtgtctccagaattagactacttgtgcttggccagaaatctctcccattagaatgcatagtgttgccctggtgtctctatcagtagactgccaggggttggccagttgtctctttaattagaacgtctgatgttgcccaggtgactctattattagactgcctgtggtcagctgggagtctctcccattagtacacctgggatctcccgagtgtctctgtcattagactgcctgggttcagtggttgtctctttcattagaatgccaggggttgcccagttttctctattatcagaatacctgtgatcagccagaagtctctcccattaaaacgtctgagttcgcccaggtgtctctattattagaatgcctggagtcagccaggtgcctattccattagaatgcttggtgttgcccatgggtttgtatctttagaaaacctgggttcagccaagtgtttgccccataagaatgactgcagttggctggatatggtgactcatgcctgtaatcccagcacttttggagaccaagccaggaggatcccgaggtcaagagatggagaccatcctggccaacatggtgaaaccccatctctactaaaaatacaaaaattacctgggtgttgtggtgcatgcctgtagtcccagctactagggaggctgaggtaagagaatcacttgaacctgggaggcagaggttgcaatgagctgagatcatgccactgcactccagcctggtgacagagccagaatcaaaaaaacgaaaagacaaagaaaaaaacaaaacaatggctgcaatcacataggtgtcactatcattagacttcctggagacagtcaagagtatctcccattagaatgcctggggtcagcagggattgtctcctattagaatgcctgtggttgcccaggtgcctctatcattagactgcctggggtcggctggggcactctcttgtaataatgtgtggggtcgtgcagttgtctctatcattaaaatgcctgggtcccccagttgtctctatcattagaatgcctgctgtctgccaggagtctcattcattagaatgcctgggatcacccaggtttttcctttattagacagaattggccaggagtttctccaattaaaatgtctggcattgcccatatgtctctatcattatactacctggggtcatccaggattctctgccattagaatgtctgcgtttggccaggagtctctcacattagaatgcctttggttgccctggtgtctctatcattagaatgtctttggagggacaggagtctctgccattagaatgcctgtggttgttcagatgactctaactttagacagcctgccgttggccaggagtctctcccattagaatgcctaggctggatccaagtctttcccatttgaatgtggggttgccctgatatttttattattagactgcctggtgtcaaccgggagtctctcccatcagaatccctaaggtctcccagatgtccttattattagaatgcctggaagtgacaaaaagtctcacacattagaatgcctgaagtcgcccaggtgtctgtattataagactgcatgaggttgacgcagagtctctcccattagaatgcttggggtggcccaggtgtctctatcattagtatacctggggtcagccaggagtctttcccatgagaatgtctggggttgcctagatgtcgttatcataagactacagtgcctgtggttgttgaggtgtctctattattagaaagcctggcatcagccgggagtctctccctgtagaatgcctgaggttactcaggtgtctctattattagactgtctggggttagccaggagtctctcccatcagaatgcctaggtcacccagatgtctctatcataagactccctgaggtcagccaagagtctcttccattataatgcctgtggttgcccaagtgtctccatctttatactacctgcaatcagctgggagtctctccagttaaaatgtgtggggtctcccagggtatccatcattagaatgcctggggctggccagaagtctctcccattaaaatgcctggggtccaccaggtgtctctattatttgactgcctgtggtcggcccagagtcctccatgtgcaaagcctgggatcacccaggtgtttctatcattacattacctggatttggttgccagtctctcccattagaatgcttgtggtcacccaggtgcctctaacattagactgcctggtgttggctaagagtctgttccattaaaatgccttatgttgcccatgtgtctctataattagatggcctgaaagcagtgggagtctctcccattagaatgtctggggtcgcctaggagtctttttcattagactgcctggggtcaactaggagtgtctctcatcaaaatgcctggggtggccctgatgtctctatagagtgcattttgtcggcgaggagtctctgccattaaaatgcctgtggtcggtcaggtgactctaacctgagagttcctgcggttcaccaaaagtctctattattagaatgcctggggtggatcagcagtctcgtccattagaacgaggggttgccctggtgtctctattattagactgcctggcatctgacaggagtctctctcactagaatgcctggggccgcctagggctctctataattaggctgcctggagtcggcagaaagtctctcttagtagaatgtctggagtaggcctagagtctctcccattagaatgcctgtggtcgctcaggtgtctctatcatttgaatgcctagggtagactgggattttgtcacattagaatgcctacagtcgctcagctgtctctatcattagactgcctgcagtctgccagaattctcttgtattataaagcctgaggtcactgaagtttgtctatcattagactgcctggtgcaggccatgaatctctcccattagaatgcctggggttgccctgttgcctctaaccttggactgcctggggtcggccatgagtctctcccattaaaattcctggagtctattggagtttcttccattagaatgcctggggttgccaaggtgtctctatgattacactttctgggatttgcctggtatctctccacttagaatgtttgaggtcacccaggtgtctctataattatactgcctagagtcagccaagggtctctcccaagagaatgcctggggtcgcccggtagtctctttcattagaatggctgtgatcaccaaggtgcctttattttttacaatgcctggggttggccacgaatctccccaattagaatgcctgagtttggctgagagtctcccctattaggatgcatcacgttgcccagatgtctctataattttattgcctggggttggccaggagtatctcccattagaatgcctgggatcgcccagttgtctttatcattagactgactgaggttggccgaaagtcactcctgttaaaatggctggattcgcccaggtgtctctatcatttgactgcctggtgttggccaggagcctctcccactagaatgccttgggtcacttaggtgtttctataattagaatgccattggtctggcagaagtctctgccattagaatgcctgtggtcgcccaggagaacctaacctttgactgcctacataaaccaggagtctcttcaatcaaaatgtgtggggtaggtctggagtctcttccattagaatgcagggacacccttgtgtctctatcattggattgcctgtggttgggcgggagtctctcccattagaatgcctggggtcacccaggtgtgtctatcattagacagccttgggttggcaagaagtctctctcattacaatgtctggggtcgccccagtatctctatcattagactgcgtggggtcagcagggtgtctcccccattagaatgcctgatgtcaccaaggtgtctctatcattagactgcctggggtcagatgaaggcttcactagaatgcctggggtttggctgggagtatctcccattagaatgcctgctgtcacccaggtgtttctatgattagaatgcctggaatcggtggggagtctcttttattagaatgcctggggtcacctaggtgtctctatcattaagctgcctgcagtcggcaggcagtctcttttgttggaacacctggaatcgccctgttgtctccatcattagactgtctggggttggccaggagtctctcccattggaatgtttcaggtcagccaggagtctttttcattagaatgcctagggtggcccagttgtctctatcattagactgcctggattcggccgtgagtctctctcattagaatgcctggcatcacccaggtgcctctatcattagactgcctgcgtttggccaggatttgctcccgttagaatgcccgggatatcaaaattgtctctttcattagactgccttgggttggctgggagttcctcccattaaaattcccggggtcgccaaagtgtctttatcattaggctgcctggcgtaagccaggagtctctcccatgagaatacctggtgtcgccgggtgtctctacccttagactgcctgaattcggacacttgtttctatccttagactgcctggggtctgcaaggagtctctccccttagaatgcctgggttcgcccatgtgtctctataattagaatgcctggttcctgtgggagtctctcccattagaatgccttgggccgcccaggtgcctttatcagtagactgtgtggggttgaccaggtgtctctcccattagatttcctaaggctgttcagttttctctaacattagacatcctggagtccaccaggggtctctgccattagaatgccagtggtcgcccaggagactttatcctttgactgcctgtggtcggccagggggtgtctctgattagagtgcctgctgtgggtcaggaatctcttattagtatgttctttcacccagttgcctctgccattagactgcctggggtcagtcagcagtctctcccattagaatgcctgcagttgtccataagtctctatcagtagaatgtctggggtcagccgtgagtctctcccattacaatgcttgtggtcacccaggtacctctatcattagactgcctgtgatcagccaggagtctctccaattaaaatgcatggggtctcctaggatctccattattagaatgcctgaggtcgcccaggtatttctatcattagaatacctcatgtctgccaggagtctttctgattagaattcctcgggtggctcaggtatctttctcattaaaatgcctggggtcagccaaatgtctctcacattagaatgcctggggtcgataacgtgtatctatcattagaatgtctggggtcggctgggagtcttgcccagtaaaaagcctggggtcacccaggtgtttctattattagactgcctgggttcagctgcaagtctctcccattaaaatgcttggggtcgctcaggtgtctcttcattagactgcctggtgttgaccagaaatctgtatcattaaaatgtctcaggtcgtccatgtgtctttataattagactgacagaagttggcaagagttcctcccgttagaatgcctggcatcaccaaggattctctattattagacttcctggggtaggccaggactgtctcctaatagaatgcctgaggttacccaggtgtctttataattagagtgcatttcatcagcaaggactctctgccattataatacctgtgtttacccaggtgactctcacttgagagtgcctggagttggccaaaagtctgtctcattagaatgcctagggtgggtcagtagtctctttcattagaatgtggggtcgcccaggtatctctatcattaaactgcctggggttggctgggaatctcttccattagaatgcctggggtcacccaggtgtctctataattagactgcctggggtcagccaggagtctctcccaaaagagtgccttgggtcagccgagagtctctcatattagaatgcctgggtttgccaagatgtctctattattagaatgcctgggtttggccagaattctctcctattaagatacctggggtcacccaggtgcctctatcatcattagactgccaggagtcagccaaaagtctgtcttattagagtgcttggggtcacccaagtgcctctataattagacgacatggtgtcagctaggtgcctttcccattaaaatgcctggtgttgcccgactgtctctattttttgactgcctggggtaggctgggagtctccacagtagaaagcctgtggttgacagggagtcttcttagaatgcctgagttcctgtaggtgtctttatcattagactgccttgggtcagccgaaattatctccaattaaaacgcctgggttcgcccaggcgtctctataattagactgcctgggatcatccaggagtctctaagagaatgcctggagcggcccaggtgtctctatctttaaagtgcctggtgtcagccaggagtgtctctcatgagattgcctagtgtccattggaagtttctcttatcaaaatgccttatgtcgtccaggtgtctctatcattagaatgcctatggttggcatggagtctctccccttaaaatgtctgtggttggccaggtttctctattattagtctggctaaaaccggccatgtgtatcttacattagcatgcctgggtcacccagatgtcgctatttttagactccctcggttcagctgggaatgtctcccaatacaatgcctgcagtcgcccaggtttctctataattagaatgactttggtcagccaagagtctctaccattagaatgtctgtggtcccccgggtgactctaaccttagactgcctgcagtcagccagggtctcttccattagaatgcccaaagtgggtcaggagtctctcctattagaatgcggggttgccctggtgtccctatcattagactttatggaatcggctggaaagtctctctctttagaattcctgggttcatccaggtgtctctatcattagatggcctggcatcagccgggaatctctcctattagaatgtctgaagttgcccaagtatctatttttagactgcctgtgttcagccaggagtctttcccattaaaatgtctggagtcgcccaggtgtctctatcattagactgtccgggtttggccaccagtctctcccattagaatgcttgggatcacccatgtgtctctattattgaactatctggtgtcagctggaattctttccattaaaatgccttgggtctcccatgtgtctctataattaaactggcagaagtcagtgggagtttctcccgttagaatgcctggggtcgcccaggagtctctattattagactgcctgaggtaggccaggactgtctcccagtagaatgcctggggtcacccaggtgtctttataattagagtgtatttggtcatcgaggagtctctgccagtagaatgcttgtttgcccaggtgactctaacctgagagtgcctgcagtaggcaaaagttatctctcattagaatgctggggtggatcaggagtctcttccattagaatgtggggttgcccaagtgtctctatcattaaaccacctggggttggccaggagtctttcccattagaatgcctggggtcacccagttgtctctataattagactgcctgggatcaggcaggattctctcctgagaggatgccttgtgtctgccgggaatctctcatattagaatgtatggattcgccaaaatgtatctattgttagaatgcctggagtcgtctgggattctatcctattaagacgtctgggtcgcccaggtgtctctatcattagactgccatggttcagctgagagtctctcttattagaatgtctggggcaacccaagagtctctaaaattagcctgcctgttgtcggccagatgtctttcccattaaaatgcctggtgttacctgagtgtctctatttttagactgcctggggtcagctgggtctctcccattagaatgcctggggtcaacaaggtgtcttcatcattagactgccgggggcaagctgggagtctcctttattaaaatgcctgagttgcccagatgtctctacaattaaactgctcaattttgtccctgggtgctcgagactggagaatggcgatgacttttaccaagcatacttcctgcaaacacatttttaacaaagcacatcctgcacagccctaaatccattaaaccttgagtcaacacagcacatgtttctgtgagcacatggttggggctagggttacagattaacagcatctcaagaaagaagaatttttcttagtacagaacaaaatggagtttcttacgccttcttctttctacatagacacagtaacagtctgatctctctttctttcccccacagtgtcttccattagaatgcctaaagtcacgcaactgtctctatccttagactgcctgggttcagtcaggagtctctcacattaaaatgcttccctttagaatgctcaaaattggccaggagaatctcccattaaaatgcctggagtcaccctggtgtctctatcattagaatgcctgggttcagccaggaatctctcccattagaattcctggggtcacccatgtgtctctataattagactgcctgggtaggcaaggagtctctcctgttagaatgccttgggtcagcctaaagtctctttcattagaatgactgtgatcgttcaggtgtctctataatttgaccacctgtggttggtcagggactttccctattaaaatgcctgaagtcaactaggtgtctccattattagacagcccgaggtcggccaggaatctctcccattagaatgcctgaagtcagccaggaggttttgtttgtttttatttttgcttttatggagtctcactgtcttcagtctggaatgcaatggcatgatctcggctcactgcaaactccacctccagggttcactctcccgagtagctgggactacaggcacaggccaccacacccagctaatttttgtatttctagtagagacaggttttcaccatgttggccaggatggtatcaatctcttgcactcgtgatccacccctctcagcctccaaaagtgctgagattacaggcatgggccactgcgcccagccaggagtctgtttgtttagattgccttgggttgcccagttgtctctgtcactagcctgctggtctcggccgagagtctctcccattatagagacgttaatgtgtctctataattagactgccttgggcccgcttggtgtctctcacattagaatgcctcgggtctcccaggtgtctctgtcattagcctccctggggtcggtgaggaatctctcatattagaatgcttgggctcccaaaggtgtctctgtaagactactgtcagccaggagtctctcccattagaatgcctggggtcacttgggattctctcccattaaattacctgtggtggctcaggtgtctctatcattagaatgcctcgggttggctggaagtctctaccattttaaggcctggggtcgccaaggtgtctccatcattagaatacctggagtcgataaggagtctctcccattagaatgcctagagtgtgccaggagtctctcccattaaaatgcctgaggtcgcccaggtgtctctatcattagactgcctggggtcaaccaggagtctctcccattagaatgcctgtggtccatcaggtgtcgctatcattagagtgcctttgttcagcaggaagtctctctccttagaattcctggggttgtaatccaagcactttgggaggccgagggcagtggatcacctgacgtcaggagatcaagagcagcctggctaacatggtgaaaccctgtctctactaaaaatacaaaaattagttggatgcagtggcacacatcattaatcccagctacttggggggctgaggcaaaagaatcacttgaacccagaaaatggaagttgcagtgagttgagattgtgtcactctattttagcttctgtgacaaaatgagactctgtctcaaaaaaaaaaaatgcctgaggtcggcctggagtctctccaataatgatgcctggggtcgcccaggtgtctctatcacaataaagcctggggtcgaccgggagtctctcgtgttagaatgtctggagttgcggaggtgtctctatcattacaatgcctgggctcagccaggagtctctcccattagaatgcctgaagtcacccaagtgtctctatccttagactgcctgaggtgggccaaaggtctctcccattagaatgcctggattggcctggagtattttcacagatagattgtttctagtttttcttgaggaatattcagtttctcacaatagacctcaatgtgctcagaaatgtcccttcacagattctacaaagcagtgcttttagcccattgaatcaaaacacaggttccattcggtgagatgaatccacacattacaaagcattttcacgtgtagcttgtttctaattttcatcgtgggaaatttggtttttcactaaaggctgcaatgggctcagaaatgtcttttcataggttctacaaaaagagtgtttacaatgtgttgaatgaaaacataggtttaactctatgagatgaatccacacatcacaaagcattttcacagaaaatttctttttagtttttatcgtgagatatttgtttctttactataggattcaaagggctcagaaatgtctttttgtatattctacaaaaaaagtgttttcaaactgttgaatcaaaacaaaggattaactctgtgacatgaatccacacatcataaaacgtttccacagatagcttgtttccagtttgtattgtgagatacccatttttccaaatatgcctcagtgagctcagaaatgtttcttcatagattctacaaaaaaagtttccaacctgttgaattaaaacaaagttttaagcctttgatatgaatccacacattgcaaaacgttttcacagatagctgctttctagtttttatcacgggatattagctttttcacaataggtttcaatgggctcagaaatgtcccttcgtagattctacaaaaaaagtttccaatctgtggaattaaaacagttttaactctgtgcattaaatctacacatcggaaattattttcacagatatcttgtttctaaattttaggtgggatattttgttattcactataagccttaatgagctcagaaacgtccctttgtaaattctacaaaaaaaaaagcttttccaaggtgttgaataaaaacaaaagtttaattttgagagctgaattaacatattacaaaacgttttcacggatagtttgtttctagtttatattgtagaaaatttaattttttactataagcatcaacgggttcagaaatatccatttctagatactacaaaaagagtgatttcaacgttttaaatcaaaacaaaggttttactctgtgatatgaaaccacacatcacaaacattttcccagatagtttgtttctagtttttatcatgggatattccgttttttactaaagacctcaatgggctcaggactgtccctaagtagattttacaggaagagtgttttgaacctgttgaaacaaaacaaaggttaacgtctgtgagatgaatccacacatcacaaagcattttcacagaaaccctgtttctggtttttatcacaggaaatttggtttttcatgataggtttaaaaggacaaagaaacgtactgtcatagattctgctaaaaaagtcgttccaacctgttgaatcaaaacataggttaaatgctgtgagataaatccacatataccaaagcattttcaaagatagcttgtttctaatttttatcacagaatatttggtttttcacagtaggcctcaatgggctcagaaatgtacctctgtagattctacaaaaagtgtttccaaccttgtgaatcaaaacacaggtgccattcagttagatgaatgcacacatcacaaaacattttcacatacagcttgtctctagtttttattgtgggatattagtttcttactataggtctcaaaaagctaagaaatttctatttgtagattctaaaaaatagtgtttccaatgtgttgaataaaaacaatggtttaactttgtgagatgaatctatacatcacaaagtattttcacagataggttgtttcaagtttttaccatgggataattgatttttcacaataggcctcaatgggctctgaaatgtcccttcgtagattctacaaaaagtgtgtttccaactgggtgaatcaaaatacaggttccatttggtgagatgaatccacacatcacaaacattccacacgtatcttgtttctagtttctatttcaggatatgtggtttttcactatacttctcaatgagctcagaaatgttttttcatagattctacagagagagtgtttccaacatgttgaatcaaaacaatggtttaactttgtgagataaacccacacatcacaaagcattttcacacatagctggtttccagcgtttgttcaagaaattcagtttttcactgtaggccacaatgggctcagatatgtctctttttagaccttttattttccacaaaaagagagtttccaacctgatgaatcaatacaaagattcatctctgtgagatgaatcacatttctcaaagcatttccatatttaggttgtttctagtttttaccacaggatcctttgtttttcaatacaggcctcgatgggctcataaatgttccttcatagattctacaaatagaaggtttcagtcctgatgatttacaatgcaggtttaattcagtgagaagaatccacacatcataaaactttttcacagcgtatttctagtttttatcattggatagtcggtttgtcactgtagacttcaatgagttcagaaatatcccttcatagattctacaaaaatagtgtttccagcatcttgaatcaaaatgcatttttcattcagtgagataaatacagacatcaaaaaacattttcacagaaagcttgtttctaatttttgtcaggggatattctgtttttcactaagtctcaacgggcttcgatatgtcccatcatagatacttcaaaaattgtgttttcaacctgttgaatcaaaacaaatgttgaactctctgacatgaaacctcacatggcaaagcatgtttacacataccatgtttctagcttttatcatacaattttttattttttcactgtatgcaccatgggctcagaaatgtctttttgtagtttctacaaaaagagtgtttccaatctgttgataaaagcaaaagtttaactatgtgagatgaatccacacatcacagagcattgtcacagatagcttgtttctagttattatgggttatccagtttttcactctaggctacaataagttaagaagtgttttttcatagattttacaaggaatatgattccaacattttgaatcaaaacaaaggtttcattctgtgagataaatccgtataccacaaagtatttttataaatagcttctttctagttttagttgtgtgatatttgggttttcacactaggcctcaatgggctaagaaatgttccttcatagattttacaaagaacctggttttaacctgttgaatcaaaataaaggtttaactctgtgagaaatatccacccttcacgaagcattttcatgtatagtttctttctagtttcatggtggaatattcagtttttcagtataggtttcaaaggctcagaaatttctctttgtagttctataaaaagagtattttcaatttgttgaatcaaaacataggtttaactctgtgagataaatccactcatcacaaaacattttcacgtatagcttgtttctagtttatattgcagtatatttgttttttcactataggccttaatggtctttgaaattgtcccttcatatattctacactaagagtatttccaacctgttgaatcaaaacaaagattttactctgagataactccacccatcacaaagcattttcatacatacctagtttccagtttttatttcaggatattcggttttactctataaaccagaataagctcagaaatgtcttttcatagattctacaaaaagaatgctttcaacctgttgaataaaacaaaggtttaacttcatgagatgaatccacctaatgcaaagcattttcacagatagcttgtttctagttcttaccatgagataatcaatttaatataggcctcaacgggcttagaaatatcctttggtagattccacaaaaagagtttttccaaccagctgaatcaaaacacaggttccatgtggtgagatgaatccaaagatcacaaatcgttttcacaggtaggttgtttctagtttttatcacagaatattctgttgttcactataggcctcgatggcctcggaaatgtcccttcatagattctaaaaaaaagtgtttccaacccagtgaatcacaacacaagatccattcagtgagaagaatccccatataacaaagcattttcacagagagcttgtttgtactttgcatagcgggatattcagtttctcaccttacatctcgataagctcaaaaacgtctcttcatagattctacataaagaatgttttcaaccagttgaatcaaatcaaaaatttaacactgtgagataaatccacaaatcaaaaagcattttcataggtagtttgtttctactacctatttatcaggggatgcttggtttttcactacaagtctcaatgggctcagaaatgatgtcccttcatagattctaaaaaaaaaaaaaaaaaaaaaaaaaaaagagtgtttaccacctgttgaatcaaaattaaaattttactctatgagataaatctacaccttgcaatgcattttcattgatagattctttttagtttatatcatgagatatttgattttttactacaggcctcaatggtctcggaaacatccctttgtagattctacaaagaaaggatttccaacctgttaagtcaaaacaaagatttaactctgtgagataaaaccatgcatcgcaaagcatttcacagatagcttgttcctagttcttttcgtggaatattcattttttcactatagccctcaataagcttagaaatgttcctttgtagattttacaaaaaagtgatttcagtctaacgaattagaacaaggctttaactcagtgagacaaatccagatgttaaaaagcattttctcagatagcttgtttctagttttataatgggatatttcatttttcactataggcctcaatggtctcataaatatccctttgtagattctacaataagagtgtttccaacttgttgaaccaaaacacaggtttgattcggtgagacaaattcacagctttcaaagtattttcacagaaagcttgtttctagtttctatagtgcaatattcgagttttcacagtaagcctcaatgggctcagaaatgactcttcattgatcctacaaaaagagtctatccaacttgaatcaaaacgcaggtttcattcagtgggataaatccacacatcacaaaacatattcgcagataacttgtttctactttttatcgtgggatattcagatcttcactataggccttcatgcactcagtaatgtctcttctagattctaaaaaagaatgtttccaacttgcttaatcaaaaccaaggtttaactctgtgtgatgaatccacacatcacaaagcgttttaattgataacttgtttttagtttaaatatttgaattttcactataggcctcaatagactcagaaatgtctctttgtagattctatatagagtgttttcaacctgttgaataaaaaaaaagtttaactctgtgagataaatccacacattgcaaagcattttcacagagagcttgtttttagtttgtgtcacagaatattcactttttcactatagacctcaaagggctcaaaaatgtttcttcatagattgtaaataaaagtgtttcaaacctagtgaatcaaaacacaggttttatttagtcaaatgaattaatacattacaaagcattttcacagatagcttctttcttgtttttaacatgggatattttgtttttcactaaaggcctcaatggtctcagaaatgtccctttctagattctacaaaaggagtgtttccaacctcttgaatgaaaataaaggtttcactctgtgagataaatccacacattgcaaagcattttcacgtatacctagtttctagtttttatcacaaaatatttggttattctctataaacatgaataagctcagaaatgtctttttgtagattctacaaaaagaacgttttcaatctgttgaattaaaacaatggcttacctctgtaagatgaatccacacaaggcaaagcattttcacagatagcttacttctagtgtttatcacaggataatagatttttttactatagatcctcaatgggctcagaaatatcctttcatagattctacaaaaagagtgttttccacactaaatcaaaactcatctttaatttggtgaggtgaatccaaataacacaatgcattttcacagatggcttgtttctagtttttatcatggaatactcagtttttcactataggcttcagtggcctcagacatgtccctttataggttctagaaaaagagtgtttccagtctggtgtatcacaactcaggtgccactcagtgagaagagtccacatatcacaaagcattttcacagatagcctgtttctacttttcagagcaggatattcagctgcttactataggcctgaagaactgcagaaatgtccctctgtagattttactaaaagagtgtttccaaccagcttaatgcaaacaaaaatttaacactgtaatataaatcctcaaattaccgagcatcttctctgatagctcgtttctagtatttatcgtggaatatttggttttttactatagggcttaattggctcggaaaagttccttcatagattctgaaagaagtgtatttctaactgttgaatcaaaaccaaggtttaactctatgagatgaatcaacacatcacaaagcattttcacatagtttgcttctagtttttatcaagggatattcatttttttgctataagcctagatagcatcagaaatgttcctttgtagattctacaaaaagcctgtttcaaactgttgaatcaaaataaaagtttaactctgtgagatgtatccacaggttgcaaagcatgttaacagatgcttctttctattttttatcacaggatattcagtttattactataggcctcaatgggctcaaaaatgtcacttcgtagattctacaaaataagtgtttccaatctgttatatcaaaacaaagttttatctctatgagatgaatccacacttagcaatgcattttcatagatagcttctttttagtttatatcgtgagatattcaattttttaatatagtcctcaatgggctcagatacatccctttgtagattctacaaaaaagtgttttcaacctgttgaatcaaaacaaagctttaaccctgtaagatgaatccacacatcacaaatagctcagatcacatcacagatagcttgtttctagtttttattgcagaatatttgttattttactataggcctcaacaggctcagaaatggttttttgtagattctacaaaaatcctgtttccaacctgatgattgaaaagaaaggtttacttctgtgagataaatccagacattggaaagtattttcacaggtagcttgtttcttgtttttattgtgggatattcaggttttcactatagacctcattgggctcagaaatgtcccttcatagattctacaaaaagagtgtttctaactttttgagtcaaaacacaggtttgatttggtgagatgaatccacaaatagcaaagtattttcatataaaacttgtttctagtttttatcgcaggatttttttattacaggccttaatgggctcagaaatgtctctttgtagattctataaaaaagtgtttcccatctgttgaatcaaaacagaggtttaacactgtgaggttaatccacacatcacaaagcattttcacagatagcttgtttctagtttttatagggcaatgttcaattttttactgtagtcctcaatgggctcagaaatgtccctttgtagattttacaaaaagagtgtttctaacttggtgagtcaaaacacagtttccattctgtgagataaatccacacatcacaaagcatattcccagatttttttccttctttttatcacaggatattaggtttttcactatatgggctcagtgatgtcccttctcaattatacaaaattgagtgtttccaatcagttgaataaaaacaaaggtttaaacctgtgagatgaatcctcacatctcaaagcattttaactgagaggctgtttttagtttttatcgtggcatactctgtttttcactatgcacctcaatgggctcagaaatccctttatagattttataaaaagtatattaccaatcttttgaatcaaaatagaggttctactctgtgagatgaatccacacatggcaaaaaattttcacagattgcttgtttctagtttttgtcatgggatattccatttttcagtataggtcttaatgagtttagaaatgtaaccttgtagattctacaaaaaaagtgtttccataatgttaaatgaacaaggaagtttaactttgtcagataaatctacacatctcaaaccattttcacagatagtttgtttgtagtttttatcataagatatttgtttttttactataggcctcaataggttccaaaatgtccatttgtaggttctacaaaactagtgtgtcctgttgaatcaaaacagaggtttaactctgtgatatgaatctacatatcacaaagcattttctcagttagctttttttctagtttttataacacgtctatttcattagaattcctgggatcacccaggtgtttctttcattagacatgctggggtgggccaggggtctctctcattagaatgtctggggtggccctggtttctctatcattagagtgcctggggtcagccaagtatctctcccattagaatgcctaggcttaacaaaatgtttttatcattagactgcctgcagttgggtgagagtctctcccattaaaatacctgtgtttgatcaagtgtctctatcattagaattcctgtgttcggctggaaatctctcttaatagaatgcctggggtcagccagttgtctccatcattagactgcctgggtttggctaagagtgcctctcattggaatgcctgggattgcccaagtggctctacgattagactgcctgtggtcccccagatgtctctttcatttgaatgcctggggtcgtacaggtgtctctataattagactgccagtagtcagcaagtagtcttttccattagaatacctgtggttgccaagtagtctctatttttagactgcctgcagtcacccaatagtctcccattagaatgtgtgttgtcaactggaagtctcttgcattagaatgcctgtgttgctcaggagtctcttccagtagaatgcctggggttggctagttgcctctataattagaaagcctggggtcttccttgagcctctcccattacatgtctttcagtcgaccaggtaggtgtttctatcattagactgcctggggacggccaggaatctctttcattggaatgcccacttttgcccagatgtctttatcattagactcctggtgtcagccgggagcctctcccattaaaatgcctaaggcagctcagttgtctttatcattggactgcctggggttggccaggagtctttccaactagactgcctggggtctgccgggagtctctcagattaaaatgtttttgatcacccaggtgtctctattattagactgcctggggtcggcagaaaatccctgccattagaatgcctttggtcgcccaggtgtctccatcattcaacttctggagtcagctaggagtccctcccattacaatgcctagaatcgctgggagtctctcccattataatgcctggggatgcttaggtatctttagcattagaatgcctgtggtcagccaggagtctttcccaataaaatgcaaagtgttgccccatgtcaatattattagaaggcctggggtcagctgggagtctctcccattagaaaacctggggtctgccaaaagtatttttcattagaatgcctggcatctcacagatttctctattattagaatacctggagttggcatggagcctctccaattaaaatgcccgtgtcacccagatgtctctataatttgactgcttcgggtcagccaagagactctttcaagagaatgcctggggttctctagaaatctctcttattagaatgccaggtgtctgtattattaaaatacctggggtagttctggagtttcacccattcaaatgcctgtggttgcccaggtgtctctatcattagactgcctgtggttggctgggtgtctctcccattagaatgtgtggggtcgatttggtgtcgctattattaggttgccttgggtcaaccaggagtctctttcattagaatgcctggggttggccatgagtctctcccattagaatgtctggggtcgcccaggtgtctctatcattagacttgcctggggtcagcttggagtcgcttacattagaatgcctggggtcaccctggtgtctttatagttagactgtctgggctcagtgtgaggtttctctcattagaatgcctgagtttgcccagttgtctctttcattagactgcctgggatcggccaggagtctctcccattagaatccctgaggcagcccagctgtctctatcattagattgcctgagtttggtgaaagtttctcccattagaatgcctcaggttgcccaggtgtctctattattagactgcccatggttggccaggtgtatctcccattagaatgcctcaggtccctcaggtgtctctactattagactgcccatggttggccaggtgcctttcccgttcgaatgcctgggattgcccaggtgtctctataattagactacttgggatcggtcagaagtgtctcccattcgaatgcctgtttttacccaggtgtctgtatcattatactacctgtcatcagccagtcatttcccgttagagtgcctaggttgcaccaaaaatcccttgcattagaatgtttggggtctcccaggtgtctctattgttagactgcttgggttcagtcagtagtctttcccattacaatgcatgaggtcgcccaggtgtctttatcactagacagcctggggttggctgggagtctctcccattagaatgcctggggtcattcagatgtcttcataattagactgccttgggtcacccaggagtctctccagttagaatgcttgctgttgcccaagtgtccttatccttaaactgtctggtgtctgccaggggtctgtccaattagaatgcctggggttggacgggagaaagcctgtggttgctcagctgtctctatcattagaatgcctggggtcagccgaaagtctctcccattcgaatgcctggagtcacccatgtgtctctcttattagccttcctggcatcagccaggagtttcttccattaaaatgcctgagatcaccaagatatctctttcgttagacttcctggggtcagccaggaagctctctcattacaatgccttgtgtgaggtgaaagtctttcccagaagtatgcctggtttctctatcattagacttcctggggtcaaccaggaatctcacacacaagaatgcctgtggttgcccacgtttctttataattagactgtttggccagaactctcttccattagaatgtctggtgttgcccaggtgactctaccattagaatgcctagaattggccagaagtctctcccatgaaaatgcctgggtcacccaggtgactctatcactagactgcctgggattgggtgggagtctctcccattataatctctgtggtcaatcaggtgtctctatcattagaatccctgaggtctgctggcaatcttttctattagaatttctgtttgcccaggtttctctatcattagactgcctgaggtcagccggcacgttttcccattattatacctgggataataatttcccattattatacctgggataatattgctcatgcacctctatcattaaacaacctaagtttggaaggggtctctctcattagaatgattggggttgcccaggtatctctttcattacactacctggggtcagctgggaatctctcccattaggattcacaccaagtgtctgtataattaaactgcctggggttgcccagttatctctttcattacaccacctggggtcagctgggaatctctcccattaggattcacaccaagtgtctctataattaaactggctgggctcagccaggagtctttcccattagaatggttatggtcactcaggtgtctttaccttagactgcttgaggtaagccaagagtctctcccattagaattcctggcatcgtctgagagtctttaacattagaatgcctggggtcatgcaggtgtctctataattagactgcttgaggtcagcaaagagtctctcccaagagaatacctggggttggctgaaagttttgcccattacaacgcctggggttgccgaggtgtctctatcattagaatgcctggggttgtccaggagtctctcccattagaatgcctagggttgcctaggtgtctccatcattagactgactgcagtcagctgtaaatctctcccattagaatgcatgggatcacccaggtgtctctatcactagactgccttgggtccgccgggagtcttttccatttcaatgtttcagattgcccccatgtctctacaattaggctgcctaagctcgtccaggagtctctcctaataaaatgcctgtggttggccaggtgtctctatcattagtctgtctaagttcagctgggagtatctcccattagaatgcctggggtcattcaggtgtctgtatcatcacattgcctggggtcgccaaggaatctcttttgttagaatgtctggggtagcccaggtgtctctataattagactgctgggggtcagccaggagtctctcccattagaatacctgtggtctcccaggtgtcttctttctaagactgcctgtgatcgacctcaagtcttccattaaaattcctgggatctgctgggagtctttttccttagaatgcctggggtcaccaaaatgtctttatcattagactgctggggtttgaccaggagtctctcccattaaaatgtctgaggtctccaaagtgtctctatcattagactgcctgggatcagctgggagtctctcccattagaatgcctggggtcgaccaggtgttgttatctttagtctacctgggttggccaggagtttcttccattagaatgcctgatgtcagatggaaatatctcctattagaatgactgaggtagcccagttttctctgtcactagaatgcctgggatcacccaggtttccctatcattataatgccagagattggcctaaattctccttcattagtgttccttgcatcaccaaggtgactctctccttagactgacttggtttggtgggtagtctctctcattagaatgcctggggttgccctgttgtctgtaacattagactgcctgaaattggccggaagtctcttccactggaaggtctgggttcgccaaaatgactctatcattagactgtctggtgtcagttggaagcctctcccattagaatgcctggggtaagatggaattctctaccattagaatgcctagggttggctgggagtctctcccattagagtgcctgtggtgtcccaaatgtctctatcattagaatgcctggggttgaccaagaacctctttcattagaatgtgtgggtttgcccaagtgtatctatcattagactgcctgtggtcaatggagtctctctggattgaatgcctggggtcgctctggtgtctccaacattagactgcttggggttgctcagaagtcacccccaatgcctggagtcagcatggaatctctccttttaaaatgccttgtgtctcccagatgtctctatcattagactacttggagtcatccgggagtctctccaatgagaagacctggggctgcccatgtgtctctattattagactgccttgtggtcagccttacattagaatgcatggggtagcccaggtgtctctatcattaaattgcctgaatttggctagaagtctatctgtttagagtgactagagtgaacctggagtgtctcccataacaatgcctggtgttgcccaggtgtcttcaccattggaatgcctggtatcagccaggagtctgtctcattagaatgcctggagtgacgcaggtgtctctatcattagactggctggggtcggctaggaatgtctcccattagaatgcatggggtaacccagatgactatcctttgactgcctggggttggtgaggagtctctcccattataatgcttgaaatcaaccagtattttcacaaatagcttgtttcgagtttttattgagggatattcattttttcactacaggcctcaatgggctcagaaatgtcccttttgtaaactctacaaaaagagtgtttccaacatggtgaatcaacaggttagattcgtctagattaatccacacattagaaagaattttcacagatagctctggttattattacaagatatttggtttttcttttttctattttttattatactttaagttttagggtacatgtgcacaatgtgcaggttagttacatatgtatacatgtgccatgttggtgtgctgcacccattaactcgtcatttaacattaggtatatctcctaatgctatccctcccccctccccctaccccacaacaggccccggtgtgtgatgctccccctcctgtgtccatctgttctcattgttcaattcccacctatgagtgagaacatacagtgtttggttttttgtccttgcgatagtttgctgagaatgatggcttccagcttcatccatgtccctacaaaggacatgaactcatcattttttatggctgtatagtattccatggtgtatatgtgccacgttttcttaatccggtctatcattgttggacatttggcttggttgcaagtctttgctattgtgaatagtgctgcaataaacatacctatgcaagtgtctttatagcagcatgatttataatccttcaggtatatacccagtaatgggatggctgggtcaaatggtatttctagctctacatccctgaggaatcaccacactgacttccacaagggttggactggtttacagtcccaccaacagtgtaaaagtgtttgtctttctccacatcctctccagcacctatggtttcctgaatttttaatgattgccattctaactggtgtgagatggtatctcattgtggttttgatttgcatttctctgatggcaagtgatgatgagtgttttttcatgtgtgttttggctgcataaatgtcttcttttgagaagcgtctgttcatatcctttgcccacttgttgatggggttgtttgtttttttcttgtaaatttgtttgagttcattgaagattctggatattagccctttgtcagatgagtagattgtaaaaattttctcccattttgtagtttgtctgttcactctgatggtagtttcttgtgctgtgcagaagctctttagtttaattagatcttatttgtcaattttggcttttgtttccattgcttttggtgttttagacatgaagtcctcgcctatgcctatgtcctgaatggtattgcttaggttttcttcctgggtttttatggttttaggtctaacatgtaagtctttaatccatcttgagttaatttttgtataaagtgtaaggaagggatctcatttcagctttctacatatggctagccagtttttcaagcaccatttattaaatagggaatcctttccccatttcttgtttttgtcaggtttgtcaaagatcagatggttgtagatgtgcagcattatttctgagggctctgttctgttctattggtctaaatctctgttttgataccagtactatgctgttttggttactgtagccttgtagtatagtttgaagtcgggtagcgtgatgcctccagctttgttcttttggcttaggattgacttggcgatgtgggctcttttttggttccatatgaactttaaagtagttttttccaattctttgaagaaagtcattggtagcttgatggggatggcattgaatctataaattaccttgggcagtatggccattttcacgatattgatttttcctatccatgagcatggaatattcttccatttgtttgtgtcctcttttatttcattgagcattggtttgtagttctcattgaagaagtccttcatatcccttgtaagttggattcctaggtattttattctctttgaagcaattgtgaatgggagttcactcatgatttggctctccgtttgtctgttactggtgtataagaatgcttctgatttttgcacatttattttgtatcctgagacttttctgaagttgcctatcagcttaaggagattttgggttgagacaatggggttttctagatatacaatcatctcattggcaaacagggaaaatttgacttcctcttttcctaattgaatacactttctttctcctgcctgattgccctggccagaacttccaacactatgttgaataggagtggtgagagaggacatccctgtcttgtgccagttttcaaagggaatgcttccagttttcgcacattcaatatgatattggctgtgggtttgtcatagatagctcttattattttgaggtacatcccatcaatacctactttattgagagtttttagcatgaagggctgttgaattttgtcgaaggctttttctgcatctattgagataatcatatggttttgtcattggttctgtttatatgctggattacgtttattgatttgcctatgttgaaccagcgttgcatccctgggatgaagcccacttgatcatggtggataagctttttgatgtgctgctggattcggtttgccagtatttattgaggatttttatatcaatgttcatcagggatattgttctaaaattctctttttttttgttgtgtctctgccaggctttggtaacaggatgatgctggcctcataaaatgagttagggaggactccctctttttctattgattggagtagtttcagaaggaatggtaccagctcctcctttttcctctggtagaattcagctatgaatccatgtggtccttgactttttttgcttggcaagctattaattattgcctcaatttcagagcctgttattagtctattcaaagattcaacttcttcctggtttagtcttgggaggtgtatgtgtcgaggaatttatccatttcttctatattgtctagtttatttgtgtagaggtgtttatagtattctctgatggtagtttgtatttctatgggatcggtggtgatatcccctttatcattttttattgagtctatttgattcctctctcttttcttctttattagtcttgctagtggtctatcaattttgttgatcttttaaaaaaaccagctcctggattcattgattttttgaagggttttttgcgtgtctatttccttcagctctactctgatcttagttgttcttgccttctgctagattttgaatgtgtttgctcttgcttctctagttcttttaattgtgatgttagggtgtcaattttagatctttcctactttctcttgtgggcgtttagtgctataaatttccctctacacactgctttgaatgcgtcccagagattctggtatgttgtgtctttgttctccttggtttcaaagaacatctttatttctgcctccatttcgttatgtacccagtagtcactcaggagcaggttgttcagtttccatgtcattgagcggttttcagtgagtttcttaatcctgcgttctagtttgattgcactgtggtctgagagacattttgttataatttctgtccttttacatttgcggaagagtgctttacttccaactatgtggtcaattttggaataagtgtggtgtggtgctgaaaagaatttatattctgttgatttggggtggagagttctgtagatatctattaggtccacttggtgcagagctgagttcagttcctggatatccttgctaactttctgtctcgttgatctgtctaatgttgacagtggggtgttaaagtctcccattattactgtgtgggagtctaagtctctttgtaggtctctaaggacttgctttatgaatctgggtgctcctgtattgggtgcatatatatttaggatagttagctcttcttgttgaattgatccctttaccattatataatggccttctttgtctcttttgatctttgttggtttaaattctgttttatcagagactaggattgcaattcctgcctttttatgttttccattttcttggtagatcttcctccatccctttattttaagcctatgtgtgtctctgtatgtgagatgtgtttcctgaatacagcatactgatagctcctgaccttttatccaatttgccagtctgtgtcttttaattggagcatttagcccatttgcatttaaggttaatattgttacgtgtgagtttgatcctgtcattatgatgttagctggctattttgctcattaggtgatgcagtttcttcctagcctcaatggtctttacaatttggcctgtttttgcagtggctggtatcagttgttcctttccatgtttagtgcttccttcaggagctcttttagggaaggcctggtggtgacgaaatctctcagcatttgcttgtctgtaaagcattttatttctccttcacttatgaagcttagtttgactgtatatgaaattctgcgttgaaaattctgttctttaagaatgttgaatattggcccccactctcttccggcttgtagagtttctactgacatatctgctgtttgtccgatgggcttccctttgtgggtaacccgacctttctctctggctatccttaacattttttccttcatttgaaatttggcgaatctgacaattatgtgtcttggagttgctcttctcgaggagtatctttgtagcattctctgttatttcctgaatttgaatgttggcctgccttgctagattggggaaattctcctggatattatcccgcagagtgttttccaacttggttccattctccctgtcactttcggatacaacaatccgatgtagatttggggtttttacatagtcccatatttcttgaaggctttgttcatttctttttattcttttttctataagcttctcttctcacttcatttcattcatttgatcttccatcactgataccctttcttccagttgatcgaattggttactgaggcttgtgcattcatcatgtatttctcgtgccttggttttcagctccatcaagtcctttaaggacttctctgcattggctattctagttagctattcatctaactttttttcaaggtttttaacttctttgccatgggttcgaactttctcttttagctcagaatagtttgatcatctgaagccttcttctctcaagtcgtcaaagtcattctccatccagctttgtttcattgctggtgaggagctgcattcctttggaggaggagaggcactctaatttttagagtttccagtttttcttttctgttttattccccatttttgtggttttttctacctttggtcttcaatgatggtgacgtacagatggggtttttgtgtggatgtcctttctgtttgttagttttccttctaacagtcaggaccctcagctgcaggtctgttggagtttgctggaggtccactccagaccctatttgcctaggtatcagcagcaaaggctgcagaacagcggatattggtgaacagcaaatgttgatgcctgattgttcctctggaagttttgtctcagaggagtacccggccttgtgaggtgtcagtctgcccctactggggggtgcttcccagttatgctacttggggttcagggacccacttgaggaggcaatctctccattctcagatctccagctgcgtgctgggagaaccactactctcttcaaagctgtcagacagggacaattaaatctgcaaaggtttctgttgccttttgtttggctatgtcctgcccccggaggtggagtctacagaggcaggcaggcctccttgagctgtggtgggctccaccaagttcgagcttcctagccactttgtttacctattcaagcctcggcaatggtgggtgcccctccccaagcctctctgccaccttgcagtttgatcttatactgctgtgctagcaataagcaaggctccatgggtgtagaaccctccaagccatgcaagggatataatctcctggtgtgccatttgctaagaccattggaaaagtgcagtattatggtgggagtgacctgattttccaggtgccatctgtcaccactttctttgactaggaaagtgaattccctgaccccttgtgcttcccaggtgaggtgatgcctcaccctcttttggctcatgctcggtgtcctgcacccactgtcctgaacccactttccaacactccccagtgagatgaacctggtacctcagttggaaatgcagaaatcatccatcttctgtgtggctcatgctgggagctgtagactggagctgttcctatttggcttttttggctccacccctgatgtttggtttttcacagtaggcctcaatgagcacaaaaatgtccctgcatagattctacaaaagaaaaagaaaggttttttaacctgttgaatcaaaagaaaggtttaactctgtgagatgaatccacttgtcacaaagcatcttcacagatagcttgtttttagttcttatcgcatgatatatcatttctcactataggcctcaagaggctcagaaattttcctttgtagattctacaaacacagtgttcccaacctggtgaataaaaacacatggtttagtcaatgagatgaatcaccgactaaactgaagatcttcacaggtagcctgtttacagtttttgccttgggacattcggtttttcactataggcctcatggaactcaggcctaattttgaacaatgccttcgtagattctacaaatagagtgttcccaaactggtaagtcaaaatgcaggttctattcagtgagataaatctatatatcacaaagcattttcacagatttcttgtttcaaatttttatggcaggatatttgttttttcactataggccccaatgggctcagaaatgtcccttcatagattctagaataagagtgtttccagcctcttaaatcaaaagaaagtttccatttcgtgagataaatccacacatcataaattatttttacagatggcttgtttctattttttatcttgtgatattctgtttttcactgtaggcctcaagtggctcataatgtattgttgtaaattgtaaaaaaaaaaaaaaaaaaaaaaaaaaaaaaagagtgtttttaactcttgggatgaatccacacattgagaagcattttcacagagagcttgtgtctagtgtttatcatgggatatttggtttttgactatcagcctcaatgtgtgctaaaatgtcccttcacatattctaaaaaaaagggtatttccaacctggtcaatcaaaacgcaggttacattacagaagatgaatccacacatcacaaagcatttttacagagaggttgtttctagtttttaatcatgggatattcagtttttcactattggcttcaatgggctcagaaatgttcctttgtagatcctacaaaaataaagtttcccatttggtgagttaaaaagcaggttccattaggtgagatgaattcacatattgtaatgcattttcacagagagcttatttctcataaaaaattgcaggatagtcagtttttcacaatgggccacaataatgtcataaatatcccttcgtagatactacaaaaggagtgtttacaacctgctgaatcaaaacacaacttttattaagtacaataaattcacacactacaaagccattttcaacagatagcttgtttctcgtttttaaggtgggatattcagtttttcactataggtcccagtgggctcagaaatgtcacttcatagattctacaaaaacagtgtttccaatctggtgactcaaaacactggttccattcagtaagattaatccatatatcacaaaagattttaacagagagcttgtttctagttgttatcacaaaatattcggtttttcaatataggcttcaaagagttcaaaaatgtacgttcttagattctacaagaagagggtttcctacctggtgaatcattacatagactcaattcagtgagatgaatccacatatcacaaatcattttcacagatagattgtttctagtttgtatccagggttttttgttttttgttttttttttactgtaggccccaatagactcagaaatgtctcttcataggttctgcagatgttcccaacctattcaatcaaaatgaagctttaactctgtgaggtgaatctattggggaacctgccctgataggcacataggttcttttctattttccctaagcttcagccagcttgagaaataaagggacaaagtacaaaagagagaaactttaaacctgggcatccaggggagacaacacatgtgggtaggttccaggatgccccacaagccgtaaaaccagcaaatttttgttagggagtttcaaaacgggagggagtatatgaataggtgtgggtcacagacaccaagtacttcacaaggtaatagaatattacaaggcaaataaaggcagggtgagatcacaggaccacaggaccagggtgaaattaaaattgctgatgaagtttctggcaccactgtcattgataagatcttgtcaggagacaggttttgagagcaaccgttctgactaaaatttattaggcaggaatttcctcttcctaataagcctgggagtgctatgggagactgggtctatttcacccctgcagtctacagaccataaaagacaggcattcctgggggtccgtctatagacctataccaccaggcatgtattctctttcccagggatgttctttgctgagaaaaagaattcagcaatatttctcccatttgcttttgaaagaagagaaatgtggctctgttccacctggctcaccagtggtcagattttaaggttatctctcttattctctgaacaattgctgttatcctgttcttttttcaaggtgcccagatttcatatttgttcaaacacacatgctctacaatttgtgcagttaacgcaattatcacattgttctgaggcaacatacatcttcctcagctgacaggattaagagattaaagtaaagacaggcataggaaatcacaagggtattgattggggaaatgataagtgtccatgaaatcttcacaatttatgtttagagattgcagtaaagacaggcataagaaattttaaaagtattaattaggtgaaataataaatgtccatgaaatcttcacaatccacattcttcagccatggcttcagctggttcctccatttggggtccctgacttcccacaacatctctccctttctttttatataaatgtgccatggtgatgaaggcttgttcgttctctcaattttgatgcaggattctttgactggtctggcacactaaaaacaagccgattaaacagagaaacataattccaaaatttactacagtggagcccccaataaacttaatccaagttgtgggctttaatccataaagattttctgccacctgatctaacacctcagctccaggcagaatggataagtgagcttgagaggattcaaaaatttgtttctttaatttagttgtgtccaatgataaattatcttccctacctagaaggtgtcctttgaccgtttcccatgaatgatcagtctcattataggaatatggggtgatgcagaaatccaaagtattccactggcactgcatttgcatgcaatgttcgaaactcactacccaatctccaagccaaataacagactgttttaaatcattaatttgatttgccaatttttgatcaatgccttgttaagaattccacatttgggtggaattggcttgccaatcattaacaaaataagccgtttgaatggattggtgtaatgccattccggcagtggtggtcattgcagtgactgtaattaggcccatgataacagtgatcaaagtgaaaacaaatctcttggacctttttagaattcgctgtcgcacttcattaattaaatgtattgagggggaggattcccaaggtctaggtaaagttactggaatccagattccttcttaagatcgaaccaatattatgcttctcttggagtcaaaatgggagttaatacaaaggtatagatgacaattaatgcattggacagtttgattattcgtccaaattttgatatttcctactaacagcatgtaagggggcttaacacaactctgtatgggaatagtcaggttggaggtaagtaaagcagaatgtctcgttctacgttgataaggagagagtgggacagtagtgggaaaaacagtcagaagagttttcctttcccatacttgcagtccagacatggcaatagccaatttccaaagttctgggtgttcaggctcagaatggggagtatcatacgaggcctgggtgggggataatgcctttatcttcccattttaagggaaagcataagctgatcctcctatgcaaagtagaatgatgattcttgttctcccaataagaaaaaaaataagtagcctccaggcattcccttccaccagaggagcaattgttttttaaatagccctttggtgcccagcctattattaaaccatatgagtcattttttaatattactgcatgtgagttaacacaatcttcccaaattaaagttttagatgggccctcaaaatttttagggcacgattttcctgcaggtttatattgaaagtatggggtatctcccattattcttcctttcatttgttttaaaggagaaagagagaggccagagaccaaatgtcctgttttatctgtagttgatctttccggaagataagcagcctagacttgagtttccagatggatgcaaccaggtgcatgtctgaggcacagagacgggtatttacaacccatggtaacattaaatgcagtgccttcttctcctggttgagcagggcaacggtcatctgtggctccaggcagtcacacactatcgttagtgtagatttgtgcaggagcatctaccctggtgagaggtcgaataagtggaggaagaggcacataagcccaataagaataattatgtgtagcaggtaaatcagtgtgagaggaaactggtgagacagaaagtataaggaggagaatcattaaataaaacctagtgtaaatgagattgaaggctgaaggaggaagagaagaacagagggatgttattttcaggctaatagaaatggtgagatttttaggtttgtaaggagaaaaagaaaggtaatcaggagaagtgggattagttagatgggtctccattgccatcagggaggattgatttaaatccattgtgatttggtgtgcctttttctgagcagttggcacagatcttaccacttctgaaggtagtctctgacacagacgtcttttctctgtggttttcattgtcagtgttcacccgaagcttgaatcttctggtgggttcccagacaggggattgatgatctcctggtgaaaccaggcatatcctcttccctacgttataattgtgccagattcccaggtattggcttgggagtttttccataacactggtttgccttcgtttaaggaaaattttttgcctgtataatggcgttcagctgcagttagagtattatctttagaaacatttaaaaaaattaaagtaaacaatgccaaatgtaattgggagtggggagtagttaaatcatgtttaggttgttcagactgtttggacaattgggtttttaaagtgtgattggcccgttccaccacagcctgtccctgaggattgtaagggattccagtaatatgggaaattccccactgttgcataaatgaatcaaaagccttactaacatatccagggacattgtgtctttatttgatatggaagccccataactgcaaagcaagaatacagattttttttaacataggccctgccttcccctgtttggcaagtagcccagataaaacctgagaaggtatctgcagagacatgcacatatgacagtatgccaaaggagctaacatgagtcacatccattttccataaagcattaggagttaggcctctaggattaacacaaggttcctgatttggaagtacgaagacctggcactgagagcagccgtgaacaataaacttagcctgtttccaggtaagagcaaatttatcttttaatccagcggcattgacatgagtgagattatggaactcctgagcttcttgggttgtaaaagagaccaaacagttgactttatggttaccagcagacatgggtcctggtaaagtggtatgagacccaatatgtgtaatatagaaagggtgtctacgttggtgaaccacctgttgtaaccttgaaaataaagaagccaattcagaattatcaatgtgtttgatagcagcagtttctatatttttagtggcatgtacaacataagcagaatctgagacaatatttaaaggtttgaggaaatcctgtaaggcagtaatcacagcaattaactccaccttttgagcagaagcataagaggtagaaataagtttgtctgtaggacctatgtaaccagcattgccattactggagccatcagtgaacactgtaatggcctcaggaatgggttgatctttggttaattgaggaaccacccaagacgtcatttatataaaaatcaaacaatttgttttttgaataatgattgtcaataacgccaataaaatcagccaagtgaatttgccacagtacagaatgttgaaaggcagattgaacttcaagccaatttaaaggaagtacaattacatttggatcaaatctagaaatttgaagtattctacactgagcctgcccaattaatatggctatttggtctacataaacaaagttttggacatagaatgaggaaggaaacgccactccattaaatcattatgttgaactattagtccagtaggggagtgtgatgaagcaaaaaacagaaactgaaaaggctgaaacggctgtactctagataactgggaggtctgaattctttcctctatgaattccagttctagtaaagcctcaggggtcaaagtcccggggctgtggagatcggaatctccccacagcatagagaacaagttacacagcgcataagttggaatgcctaaagtaggttttaaataatttacgttacccaaaaggttttgaaagtcatttaaagtgtttaaagaatctctcctaatttgaaatttttgaggttgaatacattgtttatcgatcaccattcctaaatattgaacaggagtgatctgttgaattttatcctgagcgacgtgtaatctagcctctgtaacacagtggcttaaaatgtggtaacagtcaattaattctttatcattgggggcagcaattaaaatgtcatcaatataatgaagaatatacacctcaggaaattgggcttgaactggtgaaagctcttgtccaacataaagctggcagattgtagggctatttagcattccctgaagaagtactttccaacaattatgagctgcaggctcctgattattgatagatggtacagtaaaagcaaatttttcacaatccgatttatgtaaagcaatatgaaaaaaagcaatctttaagatcaataactatgagaggccaatttttaggtattagagcaggggcaggcaagccaggttggacggcccccataggtttaattacagtgttaatggcccttaaatcagttaccatccgccatttgcctgatttcttttttactagaaacacaggagaattccaaggggaaagagaaggttccacatttccaagttgcaactgctcagaaaccaattgatttaaatctcccagtttttctttagaaagcggccactgctgaacccaaacaggtgtgtcagatttccattgcaaaggaataggatcaggaggcgtggcagcagctgccactaaaaaggataacctaaaccagccctgttttcttttatagtaactgggaggggtttactaatcccctcgtgctgtggtctgagaccgagtccaggaacaaaccccatattttccatcatatgctgactgggagcattataagagttacgtggaatattaatttcagcccgccattgtgccagtaaatctctaccccaaagatcaatgggaattggcatgatatagggctgaattttacccttttgaccatcagggccagtgcaaggcaaaataaatgtgctctcataaacttccttggcctttccaacacctactagtcccatgttagtgggatgtttaagccaagaggaaggccataaactagaggaaataagagaaacatcaccaccagtatctactaagccctcaaactttcttccttcaatgtgtatggtgcaggtgggctgttgtttagcaattacattaatccaataagcggccttttcactgccagagcccatcccagggccatgtgtcttatctcttttgtttaaaatgatattaggtagtaaaagcaattgagcaattgactcaccagccagaatggaaacaggaaccttggcagacacaattaatttaatctcgtcaacggaatcagatttaatgagaccagtttgaatggtgactcccttagcagaggtggatgctctacctaacacccggcccaccgaaccttgagataaagggccagtgacccccgtggggacaatcaagggcaaagaatcaagaagtaaattcagaggaatagtactacagatatcaaccatcccacctcctactgtggaggttgacaagcattgtagtgagacagaagaagctgggacccatttggttttgctgtaggtagatttgtttgtgctaggggttgcattgggactgcctgaagtggaaacacaatgttggtcttagttggaagtgtcccgtttgatgctgggacctgggactagccccactccctatttccctgtcactgtggtagggggtttccatctatatcatacttagagtggcaaatatttgcccaaagtttacctttgcgacaacgtgggcaaacagtaggagcaacatttggccatgtttgttgaactggcttggcctcttgtaagtttttaacagtgcaattttttcaaatatgaccaagttggccacaattatagcaggctccaagagaagaattaatgggaccagtttggttggtgtccttcatggcccgtgcccacagaatagctttgtgggtgtctgatccaatgccttcacaaactttaatatatgcaggcaacacgtgatcaggtaaattttgttgttggacagaacgcatggccaatttacattcagggattgcattttcaaaagctaatatacgaaggagaatgccttgagcgtgcttcatcagagacagattttttcaacagcatcttgtaatttagctaaaaaatcagggaataattcagagtgaccttgtttaactatggtaaaagaaacaggagcttggcctggagtgcgtaatttattccaagctctcatacacacctttgttacttgttctgtggtaaaggcatcaaagtttaattgggcataagcatcagagaaattatcggagcctgtgagctgagcctgagtaattagaatgccattactcatatttagctgagcctgcaaacaggcctcctctgaccaccaggtacagaattgtaaatgctgacatggggttagaacagcttttgccaaaaggtcccaatctaaaggaagtaaagtgacctcagtacaaaaagtttgtaaaactatcttaacgtaaggagaagtaggaccatactgagtacaagcatccttaaattcttttaaaaaggtaagattaagaggtacataaagatgcatttgtaacccttggaagttaggtggatctagcacaaccagagaagtccattcatctaatccacttatttctttgttttggcataataagcattgcattgaagtttcaagagtaggcatctgagatggagtcggcatggaagtgacaggaaaagcatgtgcagttaagggaaactgagggtgagagggtcggaccaggatgagaatgtgagaaagaggcattgggggagcagaacgagcagaagtatactggtgattactgttgttcaagtgtgaagaagggtatagagaagcaatctgagtggatggtaaagtgactggttgaggaaacgaaacgacaggagggtgaggggctgaagtgtatggtgggagggcctggagaatgataggtaaattgtagtttggtcctggagccattagctgacttcagagatttgaagagagaagaattagcatacctgtggtactgggctgtgtgctttgcagccgtgggagtttcaagtactggctcttcatgaaattcgtgaaaagaagataagtagggggtaactttaaaccaaagtcaccatagttagacatagaattttcagcatcattaggtgggggaggagtagccaaagggagagtctgatcagatgggggccctgtgggagaggaaggctgagggaaaggtggaggatctgaggaaaaggcagaaaactgtggcaactgcagggggtcacgagatccacacaccactaagacagcaggtaccaaccaccccaaacagtgacaggaacataataccctgctgagaccagctaccagaatgctgtaccaacacaatcccacacttttacatctatggttcctttttcaggaaaccaaggacagaaccactgccctgaatagagtgaccatattttccatggttactcggacactgccctgttttaacaggagtttaatatagcagatataagtatgatgcttagactctgcatgacccatagttaacccagaccatacatagactactcatcactcatcagggattctaacaagtgtatctgtggaccaagccgatgacgtttcaccacacctaccaaagggaatcgggttccctcatgcacttaggaaaaaagaaagacaatgtgtgtgctagatattggggaacctgccccaatagtcacgtatgttctttcctatattccctaagcattggccagtttgagaaataaagtgacagagtacaaaagagagaaattttaaagctgggcgtccggggtagacatcacgtattggtaggttccatgatgccccacaagctgtaaaaccagcaaggttttattaaggcgtttcaaaaggagagggagtatacgaataggtgtgggtcacgaacatcaagtacttcacaaggtaatagaatatcacaaggcaaatggaggcagggcgagatcacaggaccacaggaccgtggtgaaattaaaattgctaatgaagttttgggcaccattgtcattgataacatcttattaggagaaagggttttgagagcaaccggtctgactaaaatttattagacaggaatttcctcttcccaataagcctgggagcactatgggagactggggtctatttcacccctgtagtctacagaccataaaagaggggcacgcacaggggggccatctatagacttatacccctgggtgcatattctctttcccagggatgttccttgctgagaaaaagaattcagcaatatttctcctatttgcttttgaaagaagagaaatatggctctgttccatctggctcaccagcagtcagagtttaaggttatctctcttattctctgaacaattgctcttatcgtgttcttttttcaaggtgcccagatttcatatttgttcaaacacacatgctctacagtttgtgcaggtaacacaattatcacattgtcctgaggcaacatacatctgcctcagctgacaggactaagagattaaagtaaagacaggcataggaaatcacaagggtattgattggggaaatgataagcgtccatgaaatcttcacaatttatgtttagagattgcagtaaagacacgcataagaaattataaaagtattaatttggtgaactaataaatgtccatgaaatcttcacaatccacattcttctgccatggcttcagccagtccctccatttggggtccctgacttcccacaacatgaatccacacattgcaaaacatttttactaatagcgtgtttctcatttttaaggtgggatattcagtttttcactataggtttcaaagggctcagaaatgtgccttcattaattttacaaaaacagagtttccaacctgttgaatcaaagaaaaagttttgcactgtgagatgaatgcacatatcacaaagaattttcatagatgccttgtttctggtttttattgcgggatatttggtttttcactataggtctcaatgagctcagaaattacaatttctagattctacaaggagagtgtttccaagctgttcaatcaaaataataatttaactctgagatgaatcaacatatcacaagcatttttcacagatagcttctttctagtttttatcacaagatagtctgttttatattataggcctcaatgggctcagaaatgtccctttggagattttacaaaaagagtatttccaatcaggtgattcaaaacacaagttatatttggtgagatgaatgtacacattgcaaagcattttttcaaatagcttgcttctaatttttatcacgaaatatttggtttcttactgtaggtctcaattgactcataaatgtcccttcatagattctacaacaacagtgtttttaacctagtgaatcaaacaaagggtttcattcagtgagataagtccacgcattacaaagcactttcagagcaagcttgtttctagtttttatcatgggctattcagtgtgtaacaataggagtcgaaggcctcagaaatgtcccttcgtagattctacaacaacagtgtttccaacctatttaattaaagcaaaggtttaactttctaagatgaatccagacaccacaaagcatttttatacttgccttgtttctagtttttattgtgggatattcgatttttcaacataggcctgagtgggctcagaaatgtcttttcattgattctacaaaaagagtgtttccaacccgtttaattaaaacaaagatttaactctgtgagatgaatccaaacatcacaaagcatttccacagatagcttgcttctggtttttatcactggatattccgtttttcactataggcctcaatgagctcagaaatgttccttcatagattctacaaaaagcaagtttccaaggtgatgaatcaaaacaaaagtttaaatctgtgatgtaaatccagaaaacccaaagcattttaacttatagcttgtttctactttttaacatggaatattcagtttttcattataggcctcagtgagctctgaaatgttccttagtagatgctacaaaaagagtgtttcaacctattgaatcaaaacaaatgtgtaactttgtaagaggaattcccacatggcaaagcatttgcacagataggttgtttgtacttttcattgcgggatactctgtattttattataagcatcaatgctcccagaaatctcccttcatagattctacaacaagagtgtttccaacctgttgaatcaaaacaaaggtttaactctgttagatgaatccacatattacaatccattttcagagataacttttctctggttttattttgggatattctatttttcagtataggtttcaattgggtcagaaatgtttcttcatagattctaagaaaagcgtgtttccaaattgatgaattaaaagagaggtttaactctgtcagatgaattcagaccttgcaaagcatttcaacggatagcttgtttctactttttatcacaggatattctgtttttcactataaacttcaatgggatcagagatgttttttgtagattctgtaaaaaagggtttttcacctgttgaatccaaacaaagctttaactctgtgagatgaatccatgcatcacaaagcatttttacagatagcatttttctacttcttatagcaggatattgggtttctcagtataggcctaaatggactcagaaatgtctcattgtacattctacaaaaacattgtttccaacctggtgaatcaaaacagagattccattcggggagacgaatccacacatcacaaagcaacttcacatattgcgtttttctagtttttatcacaggatcctcggtttttcactatgtgcctcaatgggctcagaaatttcccttcctagattttacaaaaaaagtgtttccaacctggtgactcaaaacccaggtttgattcagtgagaagaatccagatatcacaaagcattttcacatacagcttgtttctatatgtttcttgttttattgtgggatatttgtttctttattataggcctcaatggcctctgaaaggtcccttcatagattctacaaagaaactgtttccaaactgatgaatcaaaacaatggtttaactctgtgagataaatacacacattgcaaagcattttcacagttagcttctttagaatgtttaatgcagtatattcagtttttcagtgtaggacttaatggcctcaaaaacgtttcttcatagataatacagtaaaagtgtttccaacctgttgaatcaaaacaaagttttaactgttggagatgaactcacatatggcaaagcattttcacacatagcgtttttatactttttatcacaggatattagatttttcactaccagtctcaatgagctcagaaatttcttttcgtagatactacaaaacgaggctttccagcctattgaatcaaaacaaagttttaactcattgaaataaatccacatttcatgaagcattttcacagatagcttgtttctattttttattgcaaaatatacggtctgtcactataggcctacattgtcttagaaatatccctttatagattctacagcaagagtgttttcaacctggtgaatcaatacacaggttccatttggtgagactaatccacacatcctaaagcattttcacagatagcatgcccaggggtctctatcattatactgccttgggtcagccagcagtctctcccattattatgcctggagtcgcccaggtttctctatcattagactgcctggggtcagcctgaagtctctcccgttagaatgcctggggttgcccaggtgtctctataattagacttcctggtctcagccaggagtctctcacattaaaatgcttagtgtgacattggtgtctctatcattagactgcctgaattgggccaggagtctctttcattggaatgtctggggttgaccaggtgtctctaaccttaggcagtctagggttggaccagagtctctcccattagaacgtctaaggtcatccaggtgtctttttcattagactgcatgaggtctcccagagcccctcccattagaatgcctgggttcgtggatgcattttcatcattagtctggtgcaggtcggtcgctgatatctccaatgagaatgcctggcatctcccaaattctctcaaattagaatgtctggaatcgactgggagtctctcccattagaatgcctgtggtgcccagttgtctatcattagactgcttcatgtcagttgggattctttttttttagaatgcctggggtggcccaggtgtctctgccattagactgcttggtgtcagccaggagtctctcttattcgactgcctggtgtcgcccaggtgtctattttaagactgcatggggttggccaggagatctttcattagaatgcatggaattggctgggaatctctcccattagaatgtttgggtttgctcatgtgtctctatcattagactgctgggttcagccagcagtctctcccataagaatgtctgggattgcccaggtttctctattattagactgcctggtgtcagtcaggagtctcttccattagaattgcctgtggttggccaggagtcttacccattagaattaccaaggtagcccagatgtctttataattagacagcctggggtcagctcgaagtctcttctattagaatgcttggggtccatcaggtgtctctattattagactgcctggggtcagccagaagtgtctcccattaaaatacttgcagtcgttcagatttctctgtcattatactgcctgcgattggccgggagtctctttcattagattgcctgtggttacacagatgtctctatcattagactgcctgggctggcttggtgtctttcccattagaatgccagggttcagatggaagtctctcccattagaatgccttaggtcacccaggtttctgtattattagaatgcctggggtcagatgatagtcttttccattagaatgtctaggatcacctaagtgtctctactattagactgcctgtgttcgaccattagtctctcccattacaatcactgggctcaatcagtgtctctagcattagactgcctggggttgaccacgagtatctcccattagaatgctttctgtcatctgtgagtctctcccattggagtgactggggtcacccacgtgtctctaacattagactgtttgtggttgcacagctctctctaacattagattgcttggggtcatctgagagtttcccccattagaatgcctggagtggagtcccccaggtgtctctattatgagaatgcctggtgtcagccagcagtctctcccattagaatgcctgtggtatcccaggtgtcactattattagaattcctggggtcagtggagggtatctcccataagaatgcctggtgtcacccaggtgtctctaacattagattggctggggtcctttggaagtctccactattaggatgcctggggtcacccaagtgcctctaccattagactgcctgtggtcagttgggaatctcccccattagaatggctggggtcacctaggtgtctctatgcatggattgcctgggtttgtacagaagtctctctaattagaatgcctgaggtcatccaggtgtctgtattattagactgcctggggtcaggcaggagtctctcccattagaatatctggtgtcagttggaattctctctcattagaatgcttggggtcgcatacgtgtatctattatttgcatgcctgggcttgtcctgtagtctctcccattaggatgcctgtggttgcccagttgtgaacattagactgcctggggtccgccaagattgtctcttattaaaatgccttgagttatctgggagtttctcccattagtatgcctgggttcgcccaggtgtctctatcattagactgcctggggtcagctggtaggctctcctattaaaatgccttgggtggcttagattcctctacagtttgactgcctgtgttcagccagcaatctctcccattagaatacctgggctctcccaggtgtctctattgttagactgcctgaagtcagccaggagtgtctctcattagaatacctgtattcatccctatttctttattaaactgcctgcggtttggcgggagtctctcccattaaaatgcctgtcctcgataaggtgtctatcatttgaatgcctgggttcaaccaggaatctctcttattagaacgtctccggtcatcgaagtgtctctatcataagactgcctgcatcagctaggtgtctctaccattagggtccctgaggtcagccgggagtctctattattagaatgccaagggtcgttcagatgtctctatcattagagagtctatggtcagccaggagtcttttttattagaatgcctggtgtcggcccagagtctctcccgttagaatgcctggagtcacagaggtgtctctattattagaatgtctgatgtcggtctggagtctctcccattagaatgtcttaagtcacatagatgactttatcattagactgcctgtgatcagccgggaatctctccaattaaaattcctgaggtcacccaggtgtctctataatcagactgcctggggtcagccagacatctctttcaaaagaatgcctgggtttggctggaagtctctcctattagaatgcctcgggatgcccaggtgtctctatcattaaaacgtcaagtcatctgagagtctcttccattaaaatgcctgcagtcacccagttgtctctatcattagatttcctgcagttggtcgggtgtctctcccactagaattcctggggtttttcaggtgtctctatcattagactgcctggggtaggccacgagtctctcccattagaatgcccagggtcggcggtgagtccctcccattagaatgcctagggtcacccaggtgtctctatcattagacggcctggagtcggctgggagtcactccccttaaaatgcctggggtcgatttggcatatataattatactgcctaggtttggccagaagtttctcccattagaatgcctgggtttgcccaggagttctatcattagactgcctggggtcagctgggagtctcttccgttagaatgcctggggttgctcaggtgtctttattattagactgcctgggatccaccaggagtctctttccttagaatgccttgggtcaccgaaatgtctttataattagactgcttgggttcggcaggagtctatctcattagaatgactgaggttccccaggtgactctatcgttagactaacaggggtcagcaatgaatctctcccattagaatgcctgaggttgcctaggtgtctctaacctaagactgccttttgtcggctagaagtctcttactagaatgcctggggttggctaggagtctcttctattagaatatttggggtcgcccaggtgtatcatttgattgcctgggctctgctgggagtctctcccattagaatgcctgtggttgcccaggtgtctctatcattagactgcctggggtccaccgggagtctcttccattagaatacctggggtcacccggtgtttctgtaattaggctgccttgggtcagcatggagtctttccattaaaatgcctgtggtcgcccaggtgtttctatccttaaactgcctgtagtcggccaagagtctctcccattagaatgcctggaatttcccgggagcctgtaccattagaatgcctggggtcacccagatgtctctgttattagcctgcctaagttcagccaggaatcactttcattagaatgcctggggttgcccaggggtttctatcagactgcctggtgtcagccagcagtctctcccattagaatcactggggttggcagggagtctctcccagtagattaccttgggtcgccacagtgtctctatcattggaatgcctggggtcgaccaggagtcttttgtattaaaatgcctggggttggctgggtatctccaacattagactgcctgcgtttggcattcagtttctcccattataatgcctgtgatcatccaggcgtctctaacattagactgcctgtggttggctgggtgtctctccagtttgaatgcctggttttggctggcagtctctcctattaaaatgctaggggtcgaaaaactgtctttatcattgaagtgcccgtggtagaccagaagtccctctcattagaatgttggaggttgccccagtgtctctatcgttacagtatctgaattctgcaagaagtctctctccttagaatgcctggggtcagcctggagtctctctcataaaaatgtcttaagacgcacagttgcccctatcacaagaatgcctaaggtcggcataaagtctctttcattaagatgcctggagttgcacaggtgtctctgtcattagaatgcctgcagtctgccaggagtctctatccttagactgcctggggtcagccaggagtctctcatattagaatacccagggtcagttgggagtatgttcacagacagaatgtttgtagtttttacagtgggatattcggtttttcactacactcctcaatttgttcagaaatgtccctcatagattctaaaaaaaagtgtttcaaacctgttgaatcaaaaaaatggtgtaactctttgacatgaatctaaacatcagaaagcattttcacaaatagcttctttctagttttcatcatgagatatttggtttttcactatatgcctcatacagtgaaatgtcccttcgtggattctatcaaaagagtgtttcaaacgtggtgaatcaaaacacaggtttcattcaatgagatgaatccacataccataaagcattttcgcaaatagcttgtttctagcttttaacatgggaagtttggtttttctttataggcctcaatgggctcagaaatgtcccctcatagattctacaaaaagtgtgcatttatagtgttgcatggaaacaatagtttgacactgtgagataagtccacacaacacaaagcattttcccagataacttctttctaatttttattgcaggatattctgttcattactataggcctcaagggactcaaaaatgtcccttcgttcaactacaaaaagagtgtttccaacctgttgaaacaaaacaaaggtttaaatctgtgaggtgaatccacacattgcaaagcattttcacacatagcttgtttctagtttttatagcaggatattcgttttttcactataggcctcaatgtgctcagaaatgtcccttcacagattttaccaacagagcatctttaacctggtgaagtaaaacacaggttgcattcagtgagattaatatacattttcgtagataacttgtttctcatttatatcacaggatattcaattttttactataggcttcaatggtctcagaaatgtttcttcatagattctacaaaaaaagtgtttccaacccgttgaatcaaacacaggtttaactttgtgagacaaatccacacattgcaaagcattttcacagatagcttgtatctagtttttatcatgggatattcagtttttcactagagacctcaatggtctcagaaatttttttttgtagattctacaataagagtgtttccaatgtagtggatcaaaaccaggtttaactctatgagatgaaccacacgtcacaaagcattttcacatatcgcttgttttgagtttttatcatgggatattcggtttttcactacaggcctcaatgggctcagaaatatgtcattgtagattctacaaagtatgtttccaaactgttgaatcaaaacaaaagtttaactctgtgaggccaatacccacacatctcaaagcattttcacagatacctcctgcctagtttttatcacgagatattcgatttttcaacatatgactcaatgcactcagaaatgtttctttatagactgtacaaaaagagtgttcccaaccaggcaaatcaaaatacacgcttatatctgttagatgaatgcacatattacaaagcttcttcacagatagcttgtttatagttttaattctgggatattcagttttttcactagaggcctcaatgggctcagaaatgttcctacgtagattctacaaaaagggttttccaacctgttgaatcaaagcacaagtttcattctttgagatgaatagacgaatcacaaagcattttcacagaaggttgtttccagtttctattgcaggacattcggtttttcactagaggcctcaaaatgctaaaaagtatctctgtagattctacaaaaagagtgttctgaacaatgttgaatcagaacaaaggtttaactctgtgagaagaatccacacattacaaagcattttcacagatagctgctttccatttcttatcacaggaatttcgggggtttttttcccccataggtttcaatggtttcagaaatgtttcttcgtagagtctacaaaaatagtgtttttaacctgttgaattaaaacaaaggcttaattctgtgagatgaatctacaattcacaaagcatttttgcagatagcttgtttctactatgtatcacgggatattcggtttacctttataggcctaactgggctaagaaatgtccctttgtctgttcaacaaaaagagtgtttcgaacctggtgaataaaaacaaatgtttaaccctgagacactcatccacactacacaaagtattttcgcagatagattttttctaggtttattgcaggatatttagtttttcactattggcctcaatgggttcagaaatgacccttcgtagcttctataacaagagtgtttccagcctgttgaatcaaaataaagtttgaaatctgtgagatggatccatgcatcacacagcattttcacaaatagattgtttctagatattaatgcaggagattcattttttcactatagtcctcaaggggctcataaatgtttctttgtagattctaccaaaagagtgtttcacccttgttgaatcaaaacgaaggtttaactgagtgagatgaattcacccattgcaaagcattttcacagctagcttgtttctagtttttgtcatgaagtattcagttgtccactatagtgtacaatagggacaaagatatttcttcatagattcttaaaatagagtggttccaacctgttaaatcaaaacaaaggtttaattctgtgaaataaatctacacatctcaaagcatttccacggatatcttgtttctagtttttattgcaggatattcagttttttgctataatctccataggctcagaattgtcccttcgaagatactacaaaaacaagttttttaacttgttgaatcaaaacataggtttaactcagtgagacgaatccacatattgcaaagcatttacacagctgttttgtttctagtttttattgtgggatattcatttttttgctattggcctcaatgggctcagaaatgtctctttgcagattctacaaaaagaaggtttcaacttgttgaattaaaacaaagttttaactctgcaagataaatttgtacatcacaaaattatttcacagagagctggtttctgctttttattgcaagagattcacttcgcaataggcctcaacgggctcagaaatgttttttcatagattctacaaaaagagtgttcttaacctgttgatttagaacaaaggtctaactctcgatgaatccacacatcaaaactcattttcatagtttgttttatattttaaaatgggatattagctttttcactacagacttcaattggctcagaaatttttttcatagactctacaaaaagaatgtttccaaggtgttgaataaaaacaaaggttatccctgtgagatgaatgaacgtatcacacagcattttcccacagaggttgtttctatttttgctcacgggatttttgatttttcactataggcttcaatgggctttgaaatgtccctttatataatctactaaaacagtgtttccaatttgttcaatcaaaacaaaggtttaaatctgtgacatgaatccacatattgcaaagcattttcacagatagctttgtttctagattttaaggtgcattatacctttttttactgtagtttttaatggtctcagaaatgtccctttgtagattctacaaaaaaagtgtttccaacatgttgaatcaaaacaaagcttcatctctgtgagataaatccacacatcacagagcatttttgcagataacttgtttctagtttctatcccgggatatttggtatatcactatacacctcaattggctaagaaatgtcccttcatgcattccacaaaagagtgtttccaaactggtgaatcaaaacacaggttccatttggtgagataaatgcatacatcacaaaaaatgttcacagatagcttgtttccagtttttattgacggatatatggcttcttgctataggcctcaatgggctcagaaatattccttcgtagattctacaaaaagaacgtttctaacctgttaaataaaaacaaatgtttaactctgtgagattaacccacacatcgggaaccatttacacggagagcttttcttctagcttttattgcaggatatacagtttttctctacaggcctcagtgggctcagaaacgtcttttcatagattctacaaaaagagtgatttcaacctgttggttaaaaacatagttttaactttttgagataaatccatacatcacaaagcattttcacagatggcttgtttctagattttatcaccagaaattagttttttaactataggcttcaatgggctcagaaatgtccctacattttttactgtaggcctcaatgggtcagaaatgtcccttcgtagattctaccaaaaaagtgttttcaaggtgttgaattgaaacaaagatttaactctgtgaggagaagccacacattgaaaaggattttcagagatagcttgtttctagttcttatcgtggaatattcaaattttacaatatgcctcaatgggctcagaaatgtcgcttcatagatttcacaaaaagtgtttccaacctggagaatcaaaacacaggttccattgggagagatgaatccacacatcacaaaacatttttacatatagcttgtttctagtttttaatgctggatattcagtttttcactataggtctccgtgggctcagaagtgtcctttcatagattctacaaaaagactttttcctacctgttgaattaaaacatagttttaaatctgtgagataaatgctcacatcataaatcatcttcacagatagattgtttctagattttaaggaaggatattctgcttttcactataggcctcaatggcctcagaatgtcccttcatagatgctacaaaaagagtgtttccaaggtgttgaataaaaatataagtttaactctgtgagatgaatccacacatcacaaagcattttcacacagggctcacttctagtttttatcatgggatattcagtttttcactataggcctcaacggactttgaaatatctttttgtagattcaactaaaagagtgtttttatcttgttgaatcaaaaaaaaggttgaaatctgtgacatgaatgaaaatattctaaagcattttaacagatagcttgtttctaaatattaaggcaggttgtttgatttttttactatagttcttgatggtctcagaaatgtccctctgtactttctacaaaaaaaagtgtttgcagactgtcaaatcaaaataaaggtttaattctgtaagataaatccacacattgcaaagcatttttggaaatagcttttttctagcttctattatgggatattttgttcatcactataggcctcaatgggctgagaaatgtcccttcatagactctacaaaaaagtgtttccaacctggtgaatcaaaacacaggttccatttggtaagaagaatccacacaccaataagcattttgacagatagtgtttttctgtttttcttcatgggatccttgatttttcactacaggctcaaaggggctcagaaatatcctttgtagattctacaaaatgagtatttccaacctactaaatcaaagcataggttccatccagtgagatgaatccacacattgcaaagcattttcacagatatcttttctctagtttatatcacagaatgttcagttttccactataggccaaaattggttcagaaatgttccttcatagattctgcaaaaagagtgtttgcaacctgttgaatcaaaacaaagctgtaactttgtgataggaatacacacacagcaaagcatttttacagatagcttgtttctagtttttatagcagaatcctcaaatttttactataggcctcaataagctcaattatgtcccctcatagattctacaaaaagagtgtttccaacttgttaaatcaaaataaatgtttaactctgtgagataaatgcacacaacccaaagcattttcacacaagcctgtttctagattttatcactagttttctgatttttcaccacaggcctaaataggcccagaaatgttcctttgtaatttttacaaaaagtgtgctttcaacctaatgaatcaaaagaaaggtttcactctgtgagatgaatccagacatcacaaagcatttccacagatagcttgtttgtaatttttattgagggatattcaatttttcactgtaggcctcaatgaggcctacaatttttcactgtaggcctcagaaatgtgcctgcacagattctacaaaaaaagtgattccacctgtaataccaacactttgggaggccaaggcaggcagatcaggaggtcagcaaatcgagaccatcctggttaacatgctgaaaccccatcttttataaaaatacaaaaaaactgccagttgtggtggctggcacctgtattctcagctacttgtgaggctgacgcaggagaattgcttgaaccagtgagccgagattgtgccattgcatttcagcctgggtgacagagcaagaccctgtccaaaaaaaaaaaaaaaaaaagaagaagaagaagaaaagaaaagttattccaaccttttgaatcaaaacgaaggtttaattttgtgagatgaattcacccatcataaagcattttctcagataacttgtttccagtttttcttgtggaaacctcagtttttcacaacaggcctcagaaatatctcttcatacattctacaaaaagagtgtttccaacctgttaaatcaaaacaatggtttaattctgtgaaatgaatccacacattgcaaagcattttcacagataggttgtttctagtttttatcatgggatatttcgttttcaccataacccagagagggctcagaaatgtcaactcgtagattctacaaaaagcatgtttccaacctgttgaatcacaacaatggtttaactctgtgagatgaatccacacatcacaaggcattttcataagtagttcttttttgtttatttgtttttattgcaagatatttggtttttcactataggtttcaaagggctgaaaaagtccctttagagacactaaaaaatggtgtttccaacgtattgaataaaaaaaggtttaactatgaaagaaattcaccaactgcaaagcattttcacagatagcttgtttctagttttatcacaggatccttggtttatcactgtaagactcagtgggctccccaatgtctttttgtaggttctacgaaaacagtgtttccagcctgttgaatcaaaataaagtttaattctttgagatgaatccacatatcacaaagcattttcacagatagcttgtttctagtttttatcatcagatattttgtttttcactataggcttcaatgcactcagaaatgttgattcttagattctacaaaaaagcgtgttttcaaacagatgaatcaaaacaaaggtttaactctgtgagatgaatccacacatgacaaaacattttcatagatagcttgtttgtagtttttatcatgggatattcgaattttcagcatatgcctcaatgggatcagaaatattcctgcatagattctataaaaatagtgtttccaaactggtgaatcaaagcacaggtttcatttggtgagatgaatccagccaccataaatgattttcacagatagcttgtttctacttattacagtgggatattctgtttctcactataggcctaaatgggctcagaaatttcccttcatagattttacaaaaagagtgtttccaatcagttgaatcaaaacaaaggtttaactttgtgagatgaattcacacatcataaagtattttcagagataacttctttctagattataagacaggatatttgttgttgttgctttgctatagacctcaataggctcagaaatcgccctatgtaggttatagaaaaaaaagtgtgtccaacctggtgaatcaagacacaggttttatttggtgagataaacccacacatcacaaagcattttcactgataccttgtttctagtttttatcacgtaatattcggattttgccaataggcctcaaaaagttcagaaatatcccttcatagattctacaaaaagagtatttccaacctgttgaatctaaacaaacgtttaactctgtaagatggatgcacacatggaaaagcattttcacagagagcttgtttctggtttatatcgcagaatattcaatttttcaccataggcctcaataggttcagaaatatcccttcatagattctacaagaaaagtgtttccaacctgttgaatataagcaagggcataactctgaaagatgcatccacagtctcaaagcaatttcacagagagcttatttatagtttttatcacaggatattctgtttttcactctagaactcaattggctcagaaatattcctttgtagattctacaaaaagattgtttccaacctgttgaatcaaaacataggtgtaactctgtgacatgaatccatacgctgcaaggcattttcacagatagcttgtttctagtttgcatcacgtgatatttggttaatcactataggcatcaatgttcttccacaaagaatgttcttcgtgcattccacaaaaagagtgtttcaaacatggtgaatcaaaacactatttccattctgttaaatgaatccacacatccaaaacagtttcctagatagcttgttttctagattgtattatgggattcttggtttttcactgtaggcctcaatgggctcagaaatgtctttttgtaggttctacaaaaagagcgtttttaacctgttgaataaaaacaaaggtggaactctgtgagatgaatccacacatcacaaagcattttcacagacagcttgtttctagttttttttatatatatagtccttaataggctaaaaacatcccttcataggttctacaataatgtttccaacctgttgaatccatgcaaagatttatctttgtgaaacaaattcacacactaaaaaacattttaacagatcacttgtttccagtttttattataaaatatttggtttcacatgataggcctcaatgggctgagaaatgttcattcatatattctacaaatagggtgtcaaaactgtggaatcaaaataaaagtttaacactgaatccacacatcacaaagcatttttacaaatagcttctgtctactttttattgcagggtattcagtttctcactgtaggcataaatgggctcagatatgtttcttcctagattctactaaaatagtgtttcacccttgtgagtcaaaacagaggttccattcgatgagaaaaatccacacatcacaaagcattttcacagatagggtgtttctagttttatcacagaatattcagttttccactgtaggcctcaatgggctcagaaatatttctttgcagattctgcagaaagagtttccaacctggtgaatcaaaacacagggtctattcagtgagatgaatccggacattgctaagcattttcacagatagcttgtaattcgtttttattgtgagacccttggtttttcacgtcaggcttcaatgggctcagaaatgtctctttttagattgtacaaaaacagtgttttcaatctgttctatcaaaccaaaggtttaattctgtgaggtgaatccacacatcacaaaccattttcacagatggttctttccagtttccatcatgaaatcctcgttgtttcctgcccccccaccccccccacacacaaacacacacacagagtcctcattgggttcacaaagattttctcatagattctactaaaaaagtgtttccaacctgttgaaccaaaacaaaggtttaactctatgagatgcttccacacatcacaaagcattttcacagacagaaagtttttagttttaatcactggatattctgtttttcactgtaggcctcaaagggctcagaaatgtcaattcgtagtttctacaaagagagtgtttccaacctgtttaattacaacaatggtttaactctctaagatgaatgaaaacatcacaaggcattttcccagatagcttgtttctagtttttattgtgggatattctgtttggcactatacacatcaatagactcagaaatgtcttatcatagattctacaaaaaaaagtatttccatcttggtgagtcaaaaataaggtttaactctgtgagatgaatccacacatcagaaagcatattcaaagatagctcgtttctagttttttattgcaagatattccattttttactataggcctcaatgggctcagatacatcccatcgtatattctacaaaaaagtgtttccaatctggtgaaccaaaacacaggctccttttaatgagatgcatccacacatcacaaggcattttcaaagagattgtttctagtttcaactgcagaatatttgtttttttactataggcttcaatgggctcagaaatgtttctttgtagattctacaaaaagagtatttccaatatggtgaataaaaaaaaaaaaagatttaactctgtgagatgaaagaacacattgctaaatattttcacagatagcttctttctagttttcatcatgggatattcagtttttcacgataggcctcaatgagctcagaaatgtcccttcatagattctacaaaaagagttctaatttgttgagtcaaaaaaagggtttaactgtgtgagataaatttacacatggccaactattttcacagatcacttgtttctagtttattttgtgggatattcagtttttcaatataagcctcaataagctcagtaatgtcccttcgtatattcttcaaaaagattgttttcaacctactaaatcaaaacacgagtttcatttggtgagatgaattcacacatcagaaagcaccttcacatgtagcttgtttctagttttgtttgcaggatattagatttttttgctatagacctaaaggagctcagaaatttctacaaaaaagttcttcccatttattcaatcaaagcagaggtttattttcatgagatgaatttgcacatcacaaatcactttcacagataacctgttttcggtttttattgcaggaaactcagtttttcactacaagcctcaatgagctcagaaatgtcccactgtaggttttacaaaaagaaggtttccaacctggtgaatcaaaacacagattcaattcactgagataaatctccactccagaaagcattttcacagatagcatctttttactttttatcatgagacatttgattttttactattggcctcaatgaggtcagaaatgtctcttggtagatcctataaaaagagtgtctccaacctgttcaatcaaaacaaaggtttaactctgtgaaatgaattcaaacattgaaaagcattttcacagatagcttgttactagtttttatcgtgtgatatttgattttttactcttagcctcaatttgctcagaaatgtccctttgtagattctattaaaaaaaaaagtgtttcttacctggtgaatcaaaactcaggtttcagtcagtgagatgaatccatacaccacaaagcattatcacagatagcttccttctagttttcattgtgggatatttgatttttcattataggcctcaatgtgcttagaaatgtccatttgtatgttctacaaaaagagtgtttccagcctgttgaatcaaaagattgatttagctctgtgagatgaatgttcacattgcaaaccactttcacagatagcttgtttgttgtttttatcatgggatattcagtttttcactagaggcctcaatggactcagaaatgccccttcatagattctacaaaaaaagtgtttctaaccctttgaatgaaaatagagttctaactctgtgaggtgaacccacaatttacaaagcatttaatcagagagcttgtttcttgtttttatagtgggatattcagttttttactataggtttcaaaagactcagaaatgtcacccagatgtttctatcattagactgtctggggtcagtcaggagtctctcccattagaatgcctgctgttgctcaggagtctgtataattagattgcctgttgtcggccaagagtctctttcatcagaatgcttgggatcatccaggtgtctctattcataggacacctgtgttcaccagcagtctctctattagaatgcttggtgttggccaatagtttcttgaattagaaggcctggggtcacctaggtgtctctattattaaaatgctttgcctcacccacttttcttcatcattagaatgctggggttgggccaagaatctctcccattagaattcctatggtttcccaggtgtctctatcactagactgtttgtggttactaggagtctctttttagaatgcctggggtttgccaggagtctctaaaattagaatgcctggagtctcccaggtatttcaatcgtaagactgcctggggtcagccaaaactctctcccattaaaattcctgtgctcttccaggtgtttctatcattagactgcctgtggttggccaggagtctctcccattagaataccttgggtcaccaaggtgtctatataggctgcctgatttcagctggaagtctttctgattagaatctctggtgtcagctggggttctccgctattagaatgcctggggccaccctggtatctctttaattagactgcttgttgtcagccaggagtctctttaattagaatgcttggaattgcccaagcgtctgtatcattagatggcctggggccagccaggaatctctcccatcagaatgcatgaggtttgctgggaatatctaaagttagaatgcctgaggtcacttaggtgactctatcattagaatgcctggggtcagccgggagcctctcccattagaatgcctggggttgttcaagtttcactatcactaaaatgcctggggctgactggggtctctcccataaaaatacctgtggacagccagatatctctatcattagactgcctgaggtcactcaggagtctctatcatttgattgccaggggtcagccaggaatctctcccattaaaatgccttgggtcgttcaggtgtctttatcattagaatgccaggattggggggcctctctaataaaaatacctggggtcgctgaggtgtctttatcattaggctgcctagggttgccaagatgtctttatcattagaattcctgagttcagccaaaattctctcccattagaatgcctgtggttgcccaaatgtctttatcattaaaatgcttggggttggccaggagtctctcccattagaatgcctatgatcacccgggtggctctatcattagactatctgaagtcggccagtagtctctttcatcagaatgtttgggtggcccaggtgtctctatcattagactgcctggagttggtctggattctctccagttagaatgcctgggttcgctcagctgtctctatcactagaatgcctggggtcatgcaggagtctcttctattagaaagtttggggtagcccaactgtctttatcattagactgcctggggttggccaggagtctctctcattagaatgcctggagtcacccaaaaatctgtataattagactgcctggggttggccaggagccttttcctttggaatgcttggggtcacccaggtgtctctatcattagactgcctgggtttggcagaacgtctctcccattagaatgcctgtggtcatgaaggagtctctatctttagactgcctggggtcagacaagattctctcccataagaatcactgggtttggccaggaccctctcctatcagaatgcctgaagctgcctagatgtctccatcattagactgcttcgggttaaatgggaaattctcccattagaatgcctgggttcacccaggtgtttctatcattagactgcctgggtttggccaggtgtctctttcatcagaatgcctggtgctggccaggagtctctcttatttgagtgcctggtgtcgtggaggtgtctatatcattacaatgcctggggccactcaggtgtctctatcattaaaaagcctcaagttgaccaggagtttctctcattagaatgtctgtgttcacccagttgtctctatcattagactgcctggggtcggccgggagtgtctgtcattagaatgcctgcagtcgcccaaatgtctccgtcatcagacttcctggagtcagcagggagtctctaccattagaatgcctgaggtctctcaggtgtctctataattagattacctggggtcagccaggaatctctcccattagaatgcctggagtttcccaggtgtctctatgcatagactgcctctttcagccagaagtctctcccagtagaatgcctgggttctgctgggagtctccccttttagaacgcctgaagacacccaggtgtctctttaattagactgcctggggtcagccaggggtctcttccattagaatgcctgtgctcgtcaaggtgtctctatcaataaactgcctgcagtttgccaaaagtctctcacattagaatgcctggggtcaagcaggtgtctctgttattagcaagctttgggttggccaggagcctctcctattaaaatgcctggagttgagcagaagtgtctcccattagaatgcatgtggtcgcccatttgtctctatcaatagactgcctgaaattagacatgggtctctcccactagaatgcctggggtcgcacaggtatctcaatcattagatttttggggttggctgagagtctctcccattagaacaccttcggtcacccaggtgtttgtttcattagactgcctggtattggctgggagtctctcccattaaaatgtctggggtctcccaggtgtctctatcaatagactgcttgggtccgtcagaagtctctcccattaaaatgccttgggttggatgggagtctctattattagaatacctttgattgcccaggtgtctcttatcagattgccttaggtcagctaggagtctctctcattagaatgcctgtggtagcccaagtttcactttcattagactgcctatggccggccaaacttctttcacattagaatgcctgggatcgccagctgtctctatcattagactgcctgtggtcagccaaaagtctcccattaaaatgcctggggtcccctaagtgtctctatcattaaactgcctgggttcgttatggagtctctcttattagaatgcctggagttacccaggtttctctatccttagactgcctgaagtttgacaagagtctctcccattagaatcactggggttcaccaggagtctctcacattagaatcctttgcattgcccagatgtctctatcattacaatgattggggtggcccacttgtcttcatcattagaatgctggggttcagccaggagtctctctgattagaatgcctaggtttgcctggggtcacttagttgtcccttatcttgactgccttggttgcccaggtgtctctatcattagactgcctggagttgcacaggtatctctatcattagaatgcctggggtggtccaagattctttcccattagaatgcctggggtcacccaagtgtctctaacatcatagtatctggtgtcaactgggaatctctttcattagaatatttggggtcgcccaggtgtctctatcattagactgccttgggtagccaggagtctctcccattagaaggcctgagtttgcccaggtgtctctatcattagactgcctgggatcatcctaatatctacctcattagaatgcctggtgtcagccaagattctctcccatttgagtgcttagagtagcataaatgtctctatcatgacaatgcctggggcatccaggtttctttctcattacaatgacttgagacgaccagtattctatcccattagaatgcctgtggtctccaggtgtctctattgtaatactgcctggggtcagatgaaagtgtctcccattaaaatgtctggggttgctcaggtgtctctattattagacagcctggggtaggccagaagtctcctccatttgaatttctgtggttgtccagtgtctctatcattagacagcctgtggtctcccaggagtctctccatcagaatgcctggtaatgaccaaaagtctttcacattagagtgcctggggttgcccaggtgtgtctaccattaaaatacttgaggttgcccagttgtctctatcattagaacaccaagattctgtgggaagtctctcccattagaatgcctaggtttgcccaggtgtttctatcattagactgccttgtgtcatccgggagtctctcccattagaatgactggggtcgccaatgtgtctctatcattagaattcctggggttggctgggggtctctcctgtaagaatggctggggtcacccaggtctctctaacattagactgcctggttttgcacaggtgtccctaagattagaatgcctaggatcgtcagggagtctcaaccaatagaatgcccatggtcacccaagtgtctctatcattagactgcctagggtcagcttagagtctctcccattagaatgtgtggggtcacccaggagtctatataattgaactgcctgagtttgaccaggagtctgtctcattagaatgcctgggatcactaaggagtctctatttctagattgccaggggtcggacgaaagtctctcattagaattaatggggttgcccaggtgtctctataattagactatctgggttaggccaggaatctttcccattagaatgcctggggtcgtttaggtgtctctatgcgtagactgcctggagttggccaggattcactcccattagaatgccttctgtcacctgaaagtctctcctattagaatgcttgggggcacccaggggtctttttaattagactgcctggggtcgtccaggactccttctcattacaatgcctctggtcgcccagttgtccctatcaatagactgcctggggttggcctggagtctcttccattaaaatgcctggggtcacccaggtacctctataattagattgcttggggccatccaggtttctctttcattgggatgcctgtgattgcccatgtttctctaaaattagactgcctggggtcggccagtagtctctcccattagaatgcctggggtcacccaggtttctctataattagactgtgtggggtccaccaggaatctctcccattagaatgcctgtggtcacccaggtgtctcatcaacagactgcatgggtcagccacgagtctctcccattagaaagtctggtgtcagctaggagtctcttttatttgaatgcctggggtcattcacctgtctttttaattcgactgcctgaggtcacttaggaatctcttccattacaatgcctgaggtcgcccaggttgcactttaattagactgtctggggttggccaggagtctcttttattagaatgcctgtggtcaccgaggtgtctctatcattagactgcctgtggtcagccaggtgtctctccattagaatgcctgagtttagccaggagtctctcacattagaatgcccgtggtcacccaagtgtctctattattaaaatgcttggggccacccacgtgcccctatcattagcatgccagggttcagcctggagtgtctcccattagaatgcctgaggtcgcccaggtgtctctatcattattctgtctggtgttggcttgggtgtctctcccattaaaatacctagtttcatccaggtgcctctatcattagaatgcctgtggttggctggaggtctctcccataagaatgactgtggttgcccagttctctctatcattagactgcctggggtcacagaggtgtctctattattagaatgcctaaagtcttttgggagtctctctcattagaatgcctagagtagcccaagtgtctttatcatcacactgcctggggttggttgggagtctctttcattagaatgcctggggtgtcccaggagtctgtataattagactgactggggtcaggaaggagtctctcccattaaaatgcctggggtagaccaagtgtctctatcattagactgcctaggtactgccaggagtatctcacattagaatgcctggattggaccaggagtctatccctagactgcctgaagtcgaataatagtctctcaccttagaatgactgaggtagccagaagtctctccaattagaatggctgggttcgcccaggtatatttatcattagactgcctggatcttcctggagtctctctcattagaatgcctggtgtcagtcaagagtctctcccatttgaatacctggggtcacacagatgtctctatcattacaatgcctggggtcacccaggtgtctctataattacaatacctcgggacgatcggtagtctctcttattagaatgccttcggtcaccaggtgtctctatcataatactgcctggggtcacacaggagtatctcttattagaatgcctggggttgcccaggtgtttctatcattagactgcctggagtcagctagaaatcttccccattagagtgcttggggtcacccatgtgtctctacccatagactgcttgggtcagccaagagtctctcccaggtttctctctcattagactgcctggtgtcagacaggagtctctctcaatcgaatgcctggtgtcaacggaaagtttctcccattagagtgcctgggttctcacaggtgtctctatcattgcaatgcctgggttgcccatgtgtccctatcattagaaagcctcatgtctgccaagagtctcccgcattagaatgcctgcaatcgcccaggtgtctctattattagatttcctagggctggccaggaatctatcccattagaatgcctggggtcccttaggtgtctctatgcatagattgcctggtgtaggccacgagtcacttccattagaatgccttgggccggctaagtctctcctactagaatgcctcaggtcacccagtggtcattttaattagactgcctggggtcgtccaagagtcgttattattagagtgtgtgtggtcacccagaggtccctatcaatggactccctgggttcagccaggagtctctcccattagcatgcctggggccacccacctttcacttcaattagactgcctgtggttggccaaaagtctctcacattagaatgcctggggccacccagggttttctatcattagactgcatgtggtcagccaaaagtttctcccattaaaattcctgaggtcccccaagtgtctctattattagactgcctgggttcggctgggagtctcatattagaatgcctacagtcacccaaatttccctatccttagactgcctgaagccagacaagagtttctcccattagaatcgctggagcttgccaggagtctctcacattagaatgtctggggtcactcaggtgtctctatcattaaaatgattggggtggcccacttgtccccatcattagattgtcagggtttggccaggagtctgattaaaatgccttgggtcgcctgggagtctcttttattagaaagcgtggggtcgcttaggtgtctcttatttagactgcctggggtttcccaggtgtctctatcattagactgcctggggttgcacaggtatccctatcactagaatgcctgcggtggtctgagagtctttcccataagaacacctggggtcacccaagtgtctctttcatcacactgactggtgttgtctgggagtatctttcattagtgtctctaacattagattgcctggggtcgttggggagtctcctccattagaatgacttgggtggcccaagtacctctatttttagactgcctggggtgggctgagagtctctcctattagaatgcttgtggtcgcccaggagtctgtataattgagcttcctgggttcgaccagggctctctcccattagaatgcctggggtcgcccaggagtctctatccttagactttcagatgtcagatgaaagtctctttcattagaatgcctggggtcgccaaagtgtctctataattagactgtctgggttcggccaggtatgtatttcattagaatgcctggggtcgcttaggtggtctgtatgcatagactgcttggagtcaaacaggagtcactcccaatagaatgctttcggtcagccgaaagactctcctattagaatgcctggtggcacccaggggtctttaattatactgcctgaggtcgtccaggcgtctttctcattacaatgcctagggtcacccagatgcctctatcattagactgtctgtggtcatccaggagtctctttcactgaaatgcctgcggttgcctatttgtctctatcattagactgcctggggtcagcctagcaataaatgaaagtttaagctatactaaacccagggttggttaatttcatgccagccactgcggccattagtctctcccattagaatgcctggggtcacccaagtttctctataattagactgtgtgaggtcagccaggaatctctcccattagaatgcctccagtcacccaggtgtctctatcaacagactgcttgggtcagccaggagtgtctcccattagaatgccttgggtcagctaggattctctcttatttgaatgcctggggtcgcccaggtgtctttttaataaaactgcatgcagttggccaggagtctctcccattagaatgccaggagttgcccatttgtcactttaattagactgcgtttagtcggccaggagtctctcctattaaaatgcctgtggtagtccaggtatgtctatcattagactgcctgtgcttagccaggaatctctccattagaatgtctgaggttagccctgagtctgtaacattagaatacctgtggttgcccaggtgtctctatcattgaaatgcttggggttgcccacttgtctctatcattagaatgcctggggtgggccagaaatctctctcattagaatgcctgttgtcacccaagtctctatccatagactgcttgggttggccaggagtctctcccattaaaatgtctgggtctcccagtttctctatcattagactgtctagggatgactggaagtctctcccattagaatacctgggttgcccacgtgtctctattgttagactgcctggcatcagacaggagtctctcattagaatgtctgatgtcaaccaaaattctctcccattagaatgcctggggtctcactggtgcctaaataattacaatgcctggggtctcccaggtttctctatcattagaatgcctcgggttggcagagagtctcttgcattagaatgcctgcaatcgcccagttgtctctatccatagactgcctggggtcaaccgtaagactctcccattataatgcctggaatcgcccaggtgtccctatgcatagaccgtctggggtcggccaggaatctctcttattagaatgcctgaggtcgcccaggtgtctctatcaataaactgccagaagtctcccccattagaatgtctgagattgggtaggagtctctcttattttaatgcctggggtcacccaggtgtctatttaattagactgactggggtcggccaggggtctctcccattagaatgcctgggatcacccaggtatctctatcattagactgcctatgcttagccagttgtctctccattagaatgccagaggttggccaggagcctctcacattagaattcctatggtcactcaggtgtctttatcctgaaaatgattggagccacccacttgtctctatcatttgaatgccaaggtttggcctcgagtctctcctattagaatgcctggggctgcctaggtgagtctgtcattatactgtctggggttgtttgggagtctcttccattaaaatgcctggtgtcacccaggtgtctctatctttaggatgcctgtggtcggctgggggtctctctcattagaatgcctggtgtcagccaagaataactcccatctgagtgcctggggtccacaggagtctctatcattgaaatgcctggggtcacccaggtgtctctgtcattacaataccttgggacgaccagtagtagtctcttccattaaaatgcatggggtcaccaacttgtcactttaattagactgcatggggttggcaagcagtcgctcccattagaatgcctgcggtcaccggtcaccaaggtgtctctatcattagactgccttgggttggttgggagtctctcccattataatgcctggtgttgcccaggtgtctctatcattagactgcctggggttagataatattctcttcattagaatgcttgggtttgcccaactgtctttaatatttgaccacctggggtcggccaaaagtctcccttattagaatgcctggtgtcagctgggagtctttctcatttgagtgcctggggtcgcacaggtgtttctatcattaaaatgcctcaggtcgcccaggtgtctctattattaaaatgcctcgggatgactgagagtctctcccattagaatgcctgtggttgcccaggtgtctcaatcataagactgcctgaggtcagatgggagtctctcccattagaatgcctggggtcacttaggtgtctctatcattagactgcctgagttcggccaggaggcttttccattagaatatctgggatccgccggcaatctttcccattagaatgtctgggttttgccaaaagtttatcccattagattgtctggaatcacccaggtgtctatatcaccagactacctggtcgactggaagtttctcacattagaatgccttgggtcgcccaggtgtctctatcattagactgcctggggtcagctgggagtgtctcccattagaatggctgaggtctcccatgtgtctctataattagacagcctgcctggggtcagccatgagtctcaaaaaaaaaaaaaaaacccatggctaccccaggtttctttatccttagactgcctagattcagccaggagtctctttcattagaatgtctgttgttgcccagatgtctctactcttagactgcctaggttccatcaggggtatctcccattagaatgtcttgggtcagccagggtctctccctttaaaatgcctggggttcatcaggggtccctcccaatagaatgtgttgggtaacctgggagtttctccttttaaaatgcgtggagtcccccaggtgtctctatcattagaatgcctgggctcaaccacgggtgtttccaataagaatgcctgtggcctcccagtgtctccatcattagattgcctgcagtcagccagggttctctcccattagaatgcctggggttgcccatgtgtctcaataattagactgcttgcaatcagcaagaagtctctcccaagagaatgcctggggttgagttggagtctctcccaataggaaggctgtgttctcccaggtgtcactattattagaatgcctggggtcagctagaagactctcacattagaatgtctggtctcaccgaggtgtctctatcattagacggcctctggttggctggtagtttctcctattagaatgcctgggatcatctggatgtctttaccattagactgcctggggttggccaggagtctctcccatttgaatgcctggggtcggctgggagtctctcccattagaatacctggggttgtccaggtgtctctatcattagactgccggggttggcctggagtctttcccattagaatgcctggagtcgcccaagtttctctgagactgcctggggttggccaggagtctctcccactagaatgttcagccaggagtctctttcattagaatgcctggggttgcccaggtgcctctatcattagactgcctggattcagccaggagtctctcccattagaatgcctgctgtcactcgtgtggctctattattagactgctggggttggcctggaatctctcccatttgaatgcctggggttgccaagatgtctctatccatagactgcttgggtcggcaaggagtctctcccgttagaatgcctttagtcggctgggagtctctcccattagaatgtttagttaagcccatgtttcactttattagactgcctggggtcacccaggagtctctcccattagaatgcctgggttgcccaggtttctctatcattagactgcctgtggtcagccaggagtctctccattagaatgcctggggttggccaggagtctctcacattagaatgcctgtggtcgcccagttgtctctatcattaaaatgcttgggtttgcccagttgtttctaccaacagaatgccagggtttgtcccagagcctctcccattagtgtaggggttcagtcaagatgctggggaaaactataaaacacaaacattcttggaaggccagggggttttgtatagcttcaaatactttgtctgaaggtggcctaatcctctttgaactatagcaagggtaattaatataggaacatagagtagttaacctaaatagcttgtttacttatgtggtcctaaaactaacctctgatcatccactggtgcatgattgctctctactcgggggttcagcaacaataattaccttctagtggtgtttacctgagacttctgtcattaaatgtgtgctaaataaatgccgggagggccaacaagtcagagccgtggctgacaggactcttcttggagtctgtaagtggcctggatgctcagcaggactgacaagcataagatctgtgtcagtgtacattattcatccgtcgttgagtcagggtctgcaggacaaacccccgcaggtggtgaccccgacatgatcaaggcagtgaaggaagcgcgatggacaccctgaaaacgaaggtgaaaaaggaaccttgtcatcagcgagcaatcagtaagtcattggtgcccactcaggatctccaagttcaggggagattgttcaggctgaggtttcatcatgagacaacagttatcagctcaacagaaacagtacataaaagtgttgaaacagctgcttaaggctagtggagcctcagttttgcaggctcaattaaatgacctaatgcaaactgttataagccaaagcctatggttcccagaaaaaggcacgctagacataaagctctcggaacaagtggggagaaatcttaaacagcattatgcacaagggcaatgagtcccagtaacacctctagcgctatgggctgtaattaggctggaccaggctccattatacacagaagagcctaaaaaggggaaggaggaaccgtaacctgcgttaccacctccttttccttcagcccggatatatcaccgggccagaataacaaaaaggaaacggggtttttcctgagccacctcctccaagagataggaaaaaggacaggagacacgctacacctatgagaccctgtctaatcaagcggcattagaaggggagcttttagcctgcctggtaatgcaaggtcagcaaggcaatcaggtacctaaagggttaagaaaaagcattagaggccagagtgctgcggtcaagcatgcagtaaatagaaagcaaacactgccagcaaatgctccccaaaacttggcctgcgtagcagctgtgttgacgaaaagccaggtccagtgcaccagagcggcctgctactgaggggcagaaggtgtgcgcgggaaggctcacccaacctgcagcagccacccggtggcgggaggagggagcggcacacgcagaaagaagcggtgcagacaagaagcggcagggcctgagcaagcacatcgcagccgctgcccccggacctgcccgctcagctctacagctccgcaggcggcccacgacaaaatttcatgtgtttattgtatacagagacgtcccaaattataattctctgctaagatttaagtaaaatttaagaatttaaaagacctctttctgataatagccactgttatctcttgcttgcccctagcgtgactctctccacatctaattaaaataaaactgtaacctctgaatgagagaaattacagagggcccatgaattagttggagagcaattgaaagctgggcatgttgaattatctagcagcccttagaattcacccattttcatcattccccaaaagtctgggaaatggtaactttttcatgacctacgtgctattaatgccaatttgcaacctgtgggaccccttcagcaggggctcctttcgcccagggcaattcctcaagattgcctataattgttattgacataagacattcttttatatgattcccctagcaggacagagaaaaaattgcgtttacaataccagctatcaataacgaaaagtcagcttgttgatttcattggaaaatccttcctcaaggaatgctaaacagtcccaccacgtgtcagtatcatgtaaatcaagctttgctcccaagtagaaaagaatttcctgattgcacaaatattcattttgtggatgatattctactagaagctccaaaggagccaatattttaaatttatattcctctgtcataaagaatacacagctaagaggtctaatcattgcacctgggaaagtacagatttcttctccttggaaatatgttgggtacatactaactgcctggtgagtaaaacctcagaagtttaaattaaataccagcaacttacataccttaaatgattatcaaaaattactgagagatattaaatggcttcaacccacttcgggaattcctactgataagctatacaacctgttttctatcttaaagggcaatccagccctggattctcccagatatttaacccctgcagcagaaagggaaatcgaggaaatagagcaagccacctctcagaggcagctaaatcgcattgattcaccttattcaattaaattgtttatctttcccaccaaacactcccctacagggttaatagggcaaatagcccccaggccacacttcctagaatgggttttttgctcacataccgggactaaaacgctatctccctatattcagttcattactaaagtcatctattcaggctgcaaacgatgcaatcagctgctaggttatgatcctgatatcatcaggattcctttaagtaaaaagcaatttgaagcagtattgcgcttatcaatatatctgcaaatagctttctctgattacacaggacaaatagagcatgaacttcctgctaataaacttcttcatttcttatctcatatgccagtaatcttgcccacaaaaatagtttactcccccatacctaatgctttaacactatttactgatggttcctgtaaacatggaaaagtgacagtctggtggagaccacatcattcagtcactcaatctgggcttactagcactcagagagctgaaatggggccctgatactggtcttggaaactttttccactcagcctatcaatatagtgagtgactcagcttactttgtttatttattgcagaaccttaaaacagccttaattaaatccaatcttgagcccatcctgtgtgctctttttcttcaacttcagcaattactagatctaagtacacatcctatttttatcacatgcattggagcccacagctctcttcctggcccattgacttatgaaaatgaacaagttggccaggcgtggtgaatcacgcctgtaatcccagcactttgggaggccgaagcaggcggatcacgaggtcaggagatcgagaccatggtgaaaccccatctctactaagaaaaaaataataataataatacaaaaaaaattagctgggcacggtggcggatgcctgtagtcccagctactcgggaggctgaggcaggagaatggcatgaacccgggaggtggggcttgcagtgagctgggatagtgccactgcactccagcgtgggtgacagagcaagactctgtctcaaaaaaaaaaaaaaaagaaaaagaaaattaacaagttgatccagaagtcatgacatcactgcttgaccaagccaccaaatcgcatcaatttttccaccaaaattggagaaatttatctaaacaatttcaacttacccagagactggctaaacaaattatcctgcaatgcctggattgtcagctcacaagcacatcccctccttccacaggtattaacttttgaggactagaaccccaacactcacttaattagtgcacatgctctgcctggaaagtcaactcgatatgtcattaaacatattttaacttttgcatttatgggactgcccaccaaaattaaaactgataatggtccagcttatgccagctcacaatttcaacaattttgtcacacatggaatatccaatattccacacgcatcccatatatggacaagccatagtagaacgtgcccactccatcattaaaaatatgctcaaaaaacagaaaagagggagtatgggtaaagttcttgtaatgttattggcacaagtcttatttactcttaagttttaaaatttagatgacaaagttcaatcagctgcagaaaagcactttgcaataacctcagaagacataaaacctgcagttttatgggaagatgtaaacagaaacgaatggtatggtccaaatgaattgttaacgtggggaagagggtatgcttgtttttccacaccctcaggtcctctttggattccagcacaatgcattaaaccataccatggtgtggctaggacacaacccagtaccagaaatggagaaaattgcctggcttagcttctgagatcagacagaaacatattggctaaagttaaaaaaggtatcgtccagtttttttgtaaaccagacttcaaaataaagcacaacaggtttttcttaaagcactaacctgctctttaacaaagattataaaaggtctcttagcacaggcaccacccctagaatttccagtacactagcacgagcctggagactacgtcctcatcaaatgatggaaagaagaaaaaacccgagccagtctaaaaaagaccctacaggacctgcagccccagacgatgcagcttccatggatgatgcaggccccagacattatgctgaagaggcataaggctaagccaaataatttattcctttttaattctctcactctgcctgcaaccagtacttgctacactctattaagctcatctctgaaatccacccttttttatgccctgttacttaacaaacacccccttcagagcttctaacagtgagactgcttggctaaaagaaattaacattctcccggtggggttcctcattgatggcatagagtgaactgagatgccaagtaacactatgggtcactctttgactggaaaataatgttgctaattataatcatgattacattatgtgatttgctaattctaggatgcaaagccggaataaaagcaatggctgccatgccttacaaacctgttgctgcatacatctgcattctccaatcaaaaagacctaatgcagaaaacagaaaagggggagatgcagggtttcagtcaggataggtgggaaaattataaaacataaaccttcttggaaggccaggggggtttgcatagcttcagatagctttgctgaagatggcctaatcctctttgaactatagcaagggtaactaacataggaatgtagagtagtttatctaaatagcttgtttactcatatggttctaaaactaacctctgaccatccgcgggtgcatgattgctctctactctgtggctcagcaacagtaattaccttctagtggtgtttacttgggacttctgtcattgaatgtgtgctaaataaatgctgggagggccaatgagtcggggctgtggctgacaggactctccttggagtccgtaaatggcccagacatttggcaggactgacaagcataagatctgtgtcagtgtatgttatttattcgttgttgagtcagggtctgcaggacagaccccagcatattagaatgcctggggtcacccaagtttctttatcattagactgcctgggttcgggcaggagtcttttattaaaatgcctcagttggccaggtgtctctatcattagactgcctggggtagcacaggtgtctctatcattaggatgcctggggttgtccaggagtctttcctattagaatgcctggggttgcccaggtgtctctatcatcacactgcctagggttggccacaagtctcttctattagaatgcctaaggtcgcccaggagtctatataattagactccctggcgttggccagaagtctctctcattagaatgcctgagatcacccagatgtctctatccttagactgcctggacttggccaggagtctttcttaataaaatgcctggagtcatccaggagtatttatccttagactgcatggggtcagagaaaagtctctctcgctagattcactggagtttgccgggagtccctcctattataatgcctgttgttgctcccagctgtttttaacatttgaccacgtggggtaggccaggagtctctctcattagaattcctagtgtcagctgggagtctctcccatttgagtgtctggggtcgcccaggtgtccctttcattacaatgcctcagggggaccaggagtctctcccattagaatgcatgtggtcgcccaggtgtctctattataagactgcctggggtcggatgagagactctcccattagaatgccaggggttgcttaggtgtccctattattagactgtctggtgttggctgggagtctctcatattagaatgcctgggattacccaggagtctctacccttaaagtaatggaaattgatgaggggtatctcattagaatgcctgggatcagcgagaagtctctcccattagaatacctgaagtcacccaggttttttataattagacttccaggggtcagccaggaatctcacccattactatgcctggggtcccccaggtgtctctatgcatgcttgtttcagccagaagtctctcccagtacaatgcctttggtcggctgaaagtctctcctattagaatgcctttggtctcccagatgtctctttaattaggcagcctttggtcagccaggagactttcccattaggatgcctgcagtctcccaggtatcactgtcattagaatgctaggggttggccaggagtctctcccattagtatgtcttgggtcactcagctgtctctctcattagactgtctgtggtcagccaggaatctctattagaatgccttgggtcacccaggtgtatttatcaatagactgcctggggttggaccggagtctctcccattgaaatgcctgaggtcagaggggaatatcttcctttagaatgcctgtgtttgcccagtagtctctatcaatagactgcctgtggtcagccgggtgtctctcccattagaattcctgcagtcacccaggtgtctctgtcattacactccccggggtcagccggaaatctctcccattagaatgcctggggtcacccaggtgtctctatagttagactgcctggcatcggccaaaattctctctcactaaaatgcctgtggacacccagttgtctctatccctagactgctttcttcagccaggagtctcttacatttgaatgcctgtggtcgactgggagtctctgctgttagaatgcctggggtctcccagctgtctctcattagactgcctggggtcagccaggattctctccattagaatgcctgctgttgtgaagtgtctctatcactagattgcctggaatcgcccaggtgtctctatcattagaatgcctagagtcagccagcagtctctttcattagaattcctgggttggccaggagtctctcacattagaaggcctggggtcactaaggtgtctctatcattaaaatgcttggggtcacccacttttctctatcattagaatggctgggctaggccaggagtctctcccattagaatgcctggcattgcccaggtgtctttatcatttgactgcctcggttggaccaggtttatctatcattggaatccttgggttcatccaggagtctctcccatgagaatgcctggggtcagccgggactctctactactagaatgcctgaggtcgcccataagtctctatcattaaatggcctagagtcgaccaggaatctttctcattagaatggctgcagttgccctggtgactctatcattagactgactggggttggccaggaatctctcccattaaaatgcctggggttgcccaagtgtctttattgttagactccctgtgattgtcccggagtctctgccattataatgccatgggttggccaggtttctctcccattagaacacctggtgttgcccaggtgtctctatcattagaatgcctgggctcaccctggagtctctttcattagaatgtctgggatcagccggcagaatttttcaatagaatgtctgggttttgccaaaagtctctcccattagattgtctggaattgcacaggtgtctagatcataagactacctgggtcacccagaagtctctcacattagaatgccttgggttccccatgtgtctctatcattagactgcctggggtcagccaggaatctctcccatcagaatgcctggggtctcccatgtgtctatataattagacagcatgaggtcaagaaggagtccctctcaaaagaaatgccttgggtcacccaggtttctttctccctagactgcctggatccagccagtagtctctttcattagaatgcctgtttttacccaggtgtctctatttttagactccatggggccggtcagctgtctctcccattagaatgtcttaggtcggccaagagtctctccctttaaaatgcctggggtcgctcaagtttttctatcattagaatgcctaaggtcggctgacagtctctcccattaaaatgcctggatttgcccaactaagtttggcatcggatctctcttacaagaatgcctgtggtcgcccaggtgtttctatcattagactgcctgtggtcagccaggggtctctcccattagaatgcctgggattgcccatatgtctcaataattagactgcctgcgatcagcaaggagtctctttcaagagaatgccttgtgttgagtgggagtctttcctattagaatgactgggatctcccaggtgtctctatcattagaatgcctggggtcagctgggagtctctcctattagaatacctgggctcgcgaaggtgtctctatcattagacagcctgaggttggctggtagtttgtttcattagaatgcctggggtggtccggatttctttacaattagactgcctggggtcagccaggagcctctcccatttgaatgcctggggtcagcagggagtctctcccattaaaatgcctggagtcacccaggcgtctctctcattagactgcctggggttagcctggagtctttcccgttagaatgcctggggtctcccaggtatctctatcattaaactgcttggggtcggccaggaatctccctcattagaatgcctgaagttgaccaagtgtctcccccattagaatgcctgttgtcacccaggtgtctctatcatcaaactgcctgggttcagccaggagtctctcttattagaatgcatggggtcgcctacatggagccattgaaaggaacaacacccttgatgcagaagatttagcaccactatctctgttccatctgggcttatatgtacttttactttttggtggtgaaattggctgatgattttcctttttcttccctggactattgtgccaactgccaggctgcctcctgcccttacagccctaaatggctgccttctttccatcaactcccaacttcttccagtgaaatttaattgtctcaatgcctccccctcccccattctctccattttctcccaagaagcatgactcgattatttgcatattttgagaaactgctgcagattagttctttttgccagttctccctggaactcctggccttttgtggagggaaggatggacagaatgggaatcttcactagaagccgtgggaagaattgcaagttacatgctctatatgcaatgtccagcagtctgataaactgatgattcttaatcaagattgttttcctggtggggaaggggcttttattttcttttagagaggggaaagtgtgagctcttcccttattcctaatggctatttttgaagcaaagaaggctagcaacgttggcacatgccacctggcaaaggacccttgagtaagtgaaggtctcctagaactgggattaagaaaccttgctgtcctcacctccaaggcagggaccatcaagaacctacagactccatctcttctgcaagcctcatgccaagcctgggctattgctgctgccccttaaacagaggctgtccttaacccacctctcctgccctgtgatatgtctgttgagttggcctggccatgtccaagaggctgtagaaaggggagaatgtcaaggaagacttttggttgagaaggagcagaaagatgtgtttttgcaaagaagaagacctctaggaagagctagtaggaatgtacatgaagaaattaagtctgaaactggcttcctcactcccctgtttctccttttcctatccttataggcctgtcccttgcctctgccctggattggctggcacactaaaggacttgatgtacataactcctgtcccttttacccttacaaggtgcggattgcccctggctttgcctcttctttgtgcctttggcctggggtgcatttccacccacccttccatgtgcctttctttgcctctgcagtctcatttctcataattttgcaaattacattttgttgctttcttacctactattggccctaaatagcagaaagaagagaagtgacctagagaacctcagattcttcattgaggattggtatagccatgatttcagccatagcaagttttgctcaacagcatatgcgtgggattttgcaaaactcctattctgatgaatcacaaagtaaggttggtaagagaagtgagtggtgtgactcttactccttaggtgcccagaacttaccatcatctctgaaggcgttacagggaagtggtctctccaatccttccctccctccagtattgccccctctcactttagcatatattaattagcaggttgggctagagaaatcagctgctatgcgggttgattattattattatttttgatccttttccttatttgccttctactccccttaatctaatctaaaagctctgttccatgtaactggagttctttatccctctcttccccttcccttatatattgaggctatggggtaggagaaaagtgcacaacccaccaccccctttactggtgcattaaaatttcttatttacccttttctcccttcccatttctccccactttcatctaccttttctggcaaaaaggagccttgtgctctctgtgaccctaagggcacactgcacaggtgaaattgccccatccagacctggctccactcttgatttctcttgccctcttctgctcttttcctggtgctcttttttctttttttcttttttttttttttttgtcttccagaactgctatatatatatatacacacatatatatttaattttattattattatactttaagttttagggtacatgtgcacaacgtgcaggtttgttacatacgtatacatgtgccatgttggtgtgctgcacccattaactcgtcatttagcattaggtatatctcctaatgctatccctgccccctcccttctcagtggggtatgggtaataggatagccatgggcttttggggacctttaacttttttttcctcttttgtttataaaaacactaaacattcaattccagagaaccaaaaatcccaccttcccaccgaacactgctaacgggcttgtgttctgctccatactttttctcttttctttctgtcttgttaatgcttttaaaaacaaatgagtttttatataaataaagtatttaaagtgtgaaaaaaaaagaatgcatggggtcatctacatgtcttttttattagactgtctggtgttggccagtagtccctcccataagaatgcctggggtcgaacaagtgtctctcccatgaaaatggctgggatcactcaggcttttcttttattacaatgcctggggtcagccgggagtttttcccgctagaatgcttgtcgcccaattgtctctagcattagactgcctgagtttggcaaagtgtgtctctcataataatgcctgtggtcgtcaaggtgtctctatcattagactgcctggggacactggggaggtatctcccattagaatgcctaggcttgcccaggtgtctttataattagactgtctgggttcagccaggattatctcccaagacaatgcctgggttcagaagagagtctttcctattagaatgactggaatcgccaaggtgtctctattattagaatgtctgtggtcaccaagagtctctccttttaaaatgcttaggctcacgcaggtgtctgtatcattaaaaaatctggggactgtcaatagtctctccctttagaatacgggggtggccaaggtgtctctatcattagactgcctggggtcggccagcagtctctcccattagaatgtctggggccagccaaaagtttctcccattagaatacatgaggtttcccaggtgtctctatcattagattgctcggggccggctgggagtctctcccactgaaatgtctaaagtcacccaggtgtctctattattagattgtctgtgcctgtggttgcccggtagtctcttttattaaaatccttttggtcactccagtgtctctatcattagactgcctgagatcggctgagagtctctctcattagaatgcctgggtccgcagggagtctctttcattagaatgcctgaaatcgcccacatgtctgtatcattacaatgcctggggttgcccaggtgtctctgtcattagaatgcctggaataggcaaggagcatctctcattagaatgcctgggttcactcagatgtctctatcattaggcagcatggggtcggccaagaatctttcccattagaatgcctggggtcgtccaagtgtctctatcattaggtggcatggggcccgccaggagtttctcccattagaatgagtttggtcgctcacgtgtcctataattagactgcctgggtttggcccagactctctcccattagaatgtgtggggttgccccgcagtctctatacttagactgcctgaagtcggacaagtgtctcttttactagaatgactggggttcgctgggagtctctttgattagaatgaatcaggtctccacgttgtctctctcattagactgcctgtggttagccgatactctattagaacgcctggggtcgcccagctgtctctatcattagactgcctgggattggatgggggtctctcccattacaatgcctgaagtcaaccaggtatttctatcattagactgcctggagtcaaacgggagtcactttcagtagaatgcctgggatagcccaagtgtctctgtaattagactgtctggtgtcggtcaggagtctctcccgttagaatgtctgggatcacccgggtgtctctatccttaaatttccttgggtcagtcaggattctctccaattaaaatgcctgtggtcagccattagcctctcccattagaatgcctgtagttgcccagttgtcactatcagactgcctagaatctctccaatcagaatactgggttcgcccaagtttctctatcattagactgtctgttgtcagccaggagtctctcccattagaatgcctggggtggcccaggtatctctatcattagaatgcctgtggtaggacgggaatctcttccattagaatgtcttgggacttccaggtgtcaataccattagactgcttgtggtcagctgggagtctcctccattggaacgcctgggattgcccaagtgtctttataattaaacagccagtgttcggctggcaatctctttcattagactgtctggcttagcccagctgtctttatgattagactgcctggggtcggtcagaagtctccccattaaaacacctggggtagaccgggagtctctgccattaaaatgactggagtcatccaggtgttttttatgattagactgttggggatcagccaggtgtctccccattagaaagcctggtttcagccttgttgtctcccattagaatgcttagggtcgctcaggtgtctctatcattaaaataactgggggctcccaaatgtctctatcattagaatgcctggggttggccgagagtctctcacattagaatgcttgccgtcaccaagaagcctctatcatcagactgcttagggtcagcctggggtttctcctattagaaagcctggagtcacccaggtgtctataattagactgcttgggtcagccaggaatctctcctattagaatgcctgtgtccactcacgtgtctctattattagactgcctggggtcggccgggagtctctttcattagaatgcctgggtttgctcaggtgtctctatccattggctgcctgggttcggccaggattctctcccattagaatgcctggggtcagccaggagtctcttccattagagtgcctgtggtggcccaggttatcactttaaatagactgtctggggtccgccaggagtctctttcattagaatgcctggagtaaccctggtatctctatcactagacagcctgtggtcagacagaagtctctttattagaatgcctggggttggccaggagtctctcacattagaattcctgggatcacccaggtgtctttaccattacaatgcttggggttgcccacttgtctttatcattagaatgccaaagttttgtcaggagtctctcccattagaatgcctggggtcgccaagatgtttctaccattagactacattgtgtcagccaggagtttctcccatcagaatgacaggggtcaaccaggggtctctatcatcagaattactggggtcagctggaggtctctcccgtaagaatgcctaaagtcgcccaggtgtttctatcattaggctggctggggttgcacaagtgtctctatcattaggatgtctgggtcatccggaagtgtcttccattagaatgtgtggtgtcattcaattgtctctataattagactgcctggggtccatgggtagtgtctcccattaaaatgctggggattgcccaggagtctgtataattgaactgcctattgtcggccaaaaatctcacccattagaatgtctggggtcaccctggtgtctctatcattagattccctgggttctgccaggagtctctcccattagaatgctgggatcacccaggagtctctatccttagactgcctcgagtaggacacaagtctcttctattagaatcactgtgtttaagcaagagtctctcttattagaatccctggggtcgccaatgtatctctatcattagactgcctggggtggcaaaggtgtctctatcattatattataatgcctggggtcgcccaagtgtctctaacattagaatgcctcggatcagccaggagtctgtctcattagaaagcctgcagtcacccaagtttctctatcactttgcctgggtttggctgggagtctttttcattagaatgcctggggtctcccaggactctgcataattagactgcctgggtttggccaggagtttcttctgttcattagactgcctggggtcagccaggagtctctttcattagaatgcttgtggtcgcctatatgtctctatcattagactgcctggggtgggccaggagcctatcccattagaatgcctggggtagccctgctgtctgtataattagactgactgtggtcaactaggaatctctcccattagaatgcctggggtctcccaggtgtgtctatcattacattgccttaggtcagcaagcagtcgctctcattacaatgcctggggtcgccctggtatctctatcattaaactgcctgaggttggcagggagtctcccccattagaatgtgtgggtttgactgcagtcactcccattagactgtctggagtcacagaggtgtctctatcattagaatgcctaaggttgtctgggagcctctcccattagaatgcctggagtagcccaattgtctctatcatcacactgcctggggttggccgggggtctttttcattacaatgtctggggtctcccagaagtgtgtaaaattaaactgcctggggcaggtcaggagtctctcctattaaaatgcctggggtcacccaagtgtctctatcattagactgcctggatttggctgggagtccctctcattagaatgcctggaggtaccaaggagcttttatccttagatagcctgaaggcggacaagagtcttttccattacaatcactgaggttggccaggagtctctcccattagaatgccttgggtcgcccaggtgcctctatcattagattgcctggggttggccaggagtctctttcattagaatgcccggggtctcccatgtgtctctataattagactgccagtggtcaactagaaatctttcccattagaatgcctggggtcacccaggtgtctctatccacagactgccttggtcagccaggagtctctcccattagaatgcctgtgttcactcagttgtcacttaaattagactgcaagatgtcggccaggagtctcttccattataatgtctggggtcactcaagtgtctctatcattagactgcctgtggtcagccaggagtctctccattagaatgcctggggttgccaggagtctctcacataaaaaaatgcctgttgtagcccaggtgtctctattactaaaatgctcacttgtctctatcattagaatgccagggtttggccaggagtttctttcagtagaatgcctggggtcgaccaggtgtttgtatcactagactgccttgggctggttggttgtctctctcattaaaatgtctagtgtcgcccagtgtctctatcattagaatacctggggttggccctgggcctctcccataagaatgcctcaggttccccagctgtctctatcattagacagcctggggtcgcacaggtgtctctatcattagaatggggtcatccaggagtctctcccattagaatgtctggggtcacctaagtgtctctataatcacactgcctgggttcagctgggagtctctttcattagaatgcctgcagtcacccaggagtctgtataattagactgtctggattcagccaggagtctctcccattaaaatgcctgatgttgctcagctgtgtatccttagactgtcttgcttgggctgggaatttgtcttattagaatgcctggagtcgcccaggaatctcacctgcctagggtcagacaagagtctcttccattagaatcactgagggtggctgggagtctctcccattagaatgactggggttgcccacgtgtctctattattagactgcctggggttagccaggagtctctctcattagaatgcctggtttcgcttacgtgtctttatcatttgaccacctggggtcagccaggaatctctcttattagaatgcctggtgttggctgggagtttctcccatttgtgtgcctggggtcacacaggtgtccctatcattacaatgcttgccatcttccagatgtctccatcattacaatgcctctggatgaccgggagtctctcccattaaaatgcctgcgattgcctaggtgtctctatcataagactgcctgggatcgcatgagagtctctcccattagaatgcctctggttgctcaggtgtctctatctttagacttccttatgtcagccgggagtctctcatattagaatgcctgggtgttgctcaggagtctctaaccttaaactgcctgggatcagacaagtctctcccattagaatcactggggtgggctgagcctctcccattagaatgactgaggtcgcccaggtgtctactgttagactgcctggggttagccaggagtctctccctttagaatgcctggttttgcccagatgtctttatcatttgactgcctgggttcagccaggaatctctctcattagactgcctggtgtctgctgggagtctctcccatttgagtgcctggggtcgcacaggtgtctctatcatgacaatacctgagatcgttcaggtgcctccatcattacaatgagtgtggacgatggggaacctctcccattacaatacctgtggtcgcccaggtgtctctatcattagaatgcctgccattctaatgtcagttgggaatctctcccatgaatacctgagctcgaggagctgtctctatcattagacagcctgcagtcggccagtagtttctccctttagaatgcctggggtcgtccagatgtctttatcattagactgcccagggtcagccaggtgtctgtcttattagaatgactggggtcagctggcagtatctcccattagaatgtctgtggttgcccaggtgtctctatctttagacagcctggggtctacctggagtctttcctgttagaatgcctgtggtcacccatgtgtctttatcattagactgcttgggttcggccaggagtctctcccattagaatggctgaagttggccgggagtctcccccattagaatgcctgtggttgcccaggtgtttctatcattagaatgcctgaggtcggttaggggtctctcccattagaattcctgtggttacccaggtgtccctattagactaacttggttgggccaggagtctctcccactggaatgcatggggttgcccaggtgtctttttcattagactaccttgtgttggccagtagtctctcccataaaaatccctggggttgaccgagagtctctcccattaaaatgcctggggtcaaacatgttgctctataattacaatgtctggggttggtcaggggtctctgccataagaatgcctagtgtggcccagctgtctctatcactagactgcctaagttcggcaaaaagtctctcccataataaggcctgtggtcacccaggtgtctctatcataagactgcctgctgttggtcaaggatctcttcccttagaatgcttcggttcacccaggtgtctctataattaggctgcctgaattcagtcaggagtctctcttaagacaatgcctgggttcacccaggaatctctcttattaaaatgatgagggtcaccaacgcgtctctattattagaatgcctgggctcacgcaggtgtctctatcatcagacagcctgtggtcgaccggtagtctctccctttagaatgcctgtggtcgcccaggtgtctttatcattaggtggcctgaggttggccagcaatttctcccattagaatgcctggggtcagccaggagtctctttcattagaatgcctgaggtctccaaggttcctctatcattagaatgttcagggacagctgggagtgtttcccattgaaatgcctagggttgtccaggggtctctattattgtactgcctggggtcagccagggttctctgccattagaatgcctagggtcacccaagtgtctgtatcattggactgcctggagtcgcctagtagtctctcccattagaatttctgcggtagcctagatgcctctatgatagggctgcctaatatcagccaggaatctgtttcattagaatgcctggggtaagcagggtgtcttttccattagaatgcctgaagtcgcccatgtgtctctatcattagaatgcctggggtcacccaggtgtttctataattagaccgtctggggtcgaccaggagtctctcccattagaatgacgggggtcgcccaggtgtttctatcattagactacctggagttggcagggggtccctttcattagaatgcctgaggtcacccagttgtctctatttttagactaccttgggctggcgcaatcctctctcattggaatgcctgtggatgcccaggtgtctctaagctcatactgcttaggtaggccagcagtttctcctattagatttcctggggtcggccaggaatctctcccattaaaatgtctggggttgcccaggggtctctatcagtagaaatcctggggtcggtggtgactcttttttattagaatgcatagggttgcacaggtgtctctatcattagactgcctgggctcaaccaggagtctcttccattaaaattctgggggtcactcgtgtttctgtcactaggccacctggtgttggctgaaagtatctttcgttagaatgccttgggtcgcccagtttttactttcattagattacctggggttgaccaggagtctctctcatttcaatgccttcagttgcccaggtgtccctattgttagattgcttgctgtctgcaaggaatctctcccattagaatgccttgtgttggccgagagtctctcccattagaatgtctggaattgcccaggtttttatatgatgagactgcctggggtcggccaggggtatctttctctcgaatgcctgggttcatgcagctgtctctataattagacagctttgagtcagccaggagtctttcacattagaatgcctgttgtcgcccaagtgtctctatcattagactgcctggtgtcagctgggagtctctcccgttagaatggctaggttcaccccagtgtctttatcattagtctgccagtggtcagctagaagtctctctcattagaacgcctggggtcggtcgggagtctctcccattagaacacctgggattgcccaggtgtctctatcattagactgccttggctcagtggggagtctctctcatttgaatgtgtggtgtcaccagatgtctctatcattagactgtctggggtcagccaggagtctctccctttgtaatgtctgggaccaaccaggtttctctattattagactgcctggtttgtatgaaagtctctcccattggaaagcctggggtcgaccaggtgtctctgtcattaaaatgcctgggttaggctggcagccttcccattagaatgtttggggtctcccaggtgtctctatcattagacacactgggtttagccaggagtgtcacccattagaaagcctgtggtcgctcaaatgtctccatcattagaatgccactggtcgctcaggtgtctctatcattagaatgcctggggtcagctggtacctcttccatttgaatgctttccaggtgtctctatcattagactccctgggtttggatgggagtctctcccattagaaagcctggggttgacaagatgttcctatcattagaatgcctggtgtcggccaagaacctatccccttacaatgcctgggttcacccagttgtctctaccattaaaatgcttgagtttggccaggattctctcccatcaaaatgcctggggtagacaatgtatctccataatttgacagcctggggtcagccaggagtgtttcctgttagaatgccgggggtcactcaggtgtctttttaattagactgactggggtcggaccggagtctttttcattaaaatgccaggggtctcccaggtgtttctatatttagactgcctggggttggccgtgagtctctcacgttagaatacctgggtttgtccaagtgtctttgttattagactgtctggataggccaggagtctctctaattagaattcctcgtgttgcccaggtgtctgtatcattagactgcctgggattaaccaggagtctctcccataagaatttctggagtcgcccaggcgtttctatccttagactgccttgggtcaaccaggagactctcattagaatgcctgggttcggccaagagtctttcccattagaatgcctgggcttacccaggtgtctctataattagaatgccttggtttggccaagattctctcccatgagaatgcccggagttgtccaggtgtctctatcattagactgcctgtggtcagcaagaagttcttctcgttagaatgtctggggacgttaaggtctctctatcattagactgtctgggttcggctggaagtctttattattagaatgcctggggttgcacagaggtctgtatcattagactgcctgagattggccgggagtctctttcagtagcattcctgggttcacccaggttctctattattagactgcctggggtcagccaggtgtttctctcattagaatgcctgggattggaccggagtctctcccattacaatgcctggggttgcccaggtgtctctatcattagactgcctggcatccgctgggagtttctttcattgtctggtgttggctgggagtctctgctataatatcgcctggagtcgcctaggtgtctctttagaatgcctggggtcgcccaggtgtcttattagactgtcttgggttggatgggattctcttccattagaaagactgggctcaacaaggtgtctctatcattagaatgcctggggttggccggtagtctttcccattagaatgcctgggttctctcaggtgtctctttagttagaccacctggggtcagccaggagtctctcccattaaaatgctggggtttggaccagagtttttcccattagaatgcattgggccgcccaggtttatcattagaccgcctggggtcggccaggagtctcttccattagaatgccagatgtggcccaggttcttctatcattagagtacctggggtcggccgggagtctctcacatttattaaactgcctgacgtcaactgggagtctctcacattagaatttttggggtcacccaagtatgtctattattagactgcctagggtcggccatgagtctctttcattagaatgcctgtgatcgccaaggtgtcttggcgaatgctaacgtgtttctatccttagactgcctgtggtcagcaaggagtctctcccattagaatgtctgtggtcacccaggtgtctctaatcttagactgcctgtgatcgcccaggagttcgatttattagaatgcctagggtctcccaactgtctctatcataagaatgcctgaggtcgttcaggagtctcttccattaaaatgcatctggtcgcccaggtgtctctatcattagaatgaatggggtcacctggaagtttctcccattggatttcctggggtccccgaggtgtctctatcattagactgcctggcggtccacacaagtctctcccattagaaagccaggggtcgaccaggtgtctctattattagaaaccctggaatcagccaaaggtctgtcccattagaatgcctggattgcccaggtgtctctatcattacaatgcctggcttcagccagcagtctctcccattataatacctggttttgcccaggtgtttccatcattagactgccccaggtcagccagaagtgtctcccattaaaatgcatgtgtctctatcatgatacagcctgtgatcaactggtagtttctcccattagaatgccgggaatcactcatgtgtttttatcattagactacttggtgtcggctgggagtctttcccattggaatgccttgggtcgtccaggtgaatttattattagactgtctggtgtctgcgggagtctcttccattacaatgctttgagttgcactggtgtctcaatcgttagactgttgggttctgccaggagtgtctcccattacaatgccttgggtcaccctggtgtttttataattagatttcctggtgtcatctaggactctttcctattagaatgcctggagtcgcccaggtgttactattctttgattgcctggggtcaaccaaggctctcttccattagaatgtctcaggtcggctgggagtctttcccattaaaatgcctggagtcgcttaggtgtctctatcattagaatgctttggattggccagtagtcttccccattaaaatgcctgggtttggccaggtgtgtttataactagactacctaaggtagtctagggtcagccaggagtctctcccattagaatacctgggttcagctgatagtctctgccattagaatgactggggtcacctaggtttttttttttttataattagaccacctggggtcggccaggagtctctcccatttgaatgcgtggggtcacccaggtgtctctataattagaccacctggtgttggccaggagtctctcccattggaatgcctgtggtcgcccaggtgtctctattattagaatgtctgtggttgatcgggagtttctccaaaatgcctgtagttgattagctgtctctattattagaatgcttgggttcgagaaggagtctcttccatttcaatgcctagggttgatcagttgtctctatcattagaatgcttggtgtcagccaggagtctcttccattagtatgcctggggccatccaggtgtctctatcattagactaccttgggtcagccgttagtctatcccattagaatgctttggtatgcccaggtgtctctatctttagactgcctggctcagccaggagtcattcccataagaatgcctggtgtcagccgggggtctctcccattagaatgcctggggttgcccaggtgtctttataattagactgcctgggattgcacaggattttctcccattagaatgtctggggttgcccaggtgtctctatcattagactgctggtgttcggacaggagccgctctcattaaaatgcctgcagtcgcccaggtttctctatcattagacagcctggaaacggcccagagtctctcccattagaatggtgtctctcctggggtcagccaggaacctcttccattagaattcttgtgatggcccacatgtctctatcattagactgcctggggttggtcgggagttgctcccattagaatgtctggggtagcccaggtgtctttaataattagactgcctggggttgaccaggagtctctcccattagaacacccgtggtcacccagctgtctctatcattagactgcctggggccagccaggagtacctctgttagaatacttgagtttacctgagagtttctcccatacctggggtggcccaggtgtctctatcattagaatgcctagggtcagcggggagtctctgccattagaatgcctggggttggctgggagccttcccatttgaatgcctggggtcgtcaaattgtctctatcattagacttcctgaatgtagcagggcatctctcacattagaatgcctggggtcacccaggtatctgtatcattagactgcctggggtcagccaggagtctttcctattagaatgcttagggtcacccaggtgtctctatcattagactgcctgctgtcacacgggagtctttctcattagaatgcctggggtcacccaggtgtctctatgattagactgcctggggttggccaggagtctctctggttagaatacctggggccacccaggtgcctctatcattagactgcctggggcctgccaggggtctcttccattagaattcctgtggtcgttcaggtgtttctatcattagactccctgcggttggccaggagttcctcccagaatgcctggggtctcccaggtgtctccataaatagactgcctggggtcagccagaagtctctcacaagagaatgcctggggtaggctgggagtctccaccattaggaggcctggagtcacgtaggtgtttctaacattagaatacctggggtcatccaggcttctctcccattaaaatgtccgggctcaccctttgtctctattattagacgtctgccatcggcccagagtgtcttctattagaatccctgtcgaccagatggctttcaccttgccatgtctaatgttgatcagatggctcttgccttaccatgtctaaggttgcccagacaacttgggccagaagcagtaccattcaaatccagcagaatgatgcgactgtgactcactgcagactcaatcttcccagtcttacccaagtgatcttcccatcttggcctctcatatatctgagattgctcggaccttctttttttttctctctctctctcactctaatttcagtttgtttccacaatactcagagtaacttgctgttctttttcttctttgttccatcctttattctcctatgctccttcctgcaaactgagtttgacctttggattttttttttttttttggttacacttcaccctgtgtgtgacaaatagagagagagacagagagagagaggagtttttttaaattgcgacattaattaccttttattattgtacactcctacttaattatttggtctttagggttgttcactattatttccttgttattgttatatatttactgttggttcatttattttgagatggatgtcgactgcatgcatcgcatttagctgccagcttgtcatgtctaagatgaacagacagctctcaccttgccatgtctaaggtcgaccagatggctctcgccttgccatatctaaggtggaccagatggcacttgcctagccatgtctaagattgaacagttggttctcacctcatcatatctaaggtcaagttggatctcaccttgccatgtttaagattgaccagatgattctcaccttgccatatctaaggtcgaccagatggctctcaccttgccatgtctaaggtcgatcagatggctctcaccttgccatgtctgaggttgaccagatgggtctcctcttcgagtgagttcaacaagatggctctcaccttgccatgtctaaggttgaccagatggatcttgccttgccatgtctaaggtcaaacagatggctcttctttttccatgtctaaggtcggccagatgactcttgccttgccatgtctaagctcaaccagatggctttcatttttccttgtcttcagtcgaccagatgtctctcaccttgccatgtctaggtcaatcagatggctctcaccttgccacatctacgattgaccagatggctcttgccattctatgtctaaagtctaccagatggctctcattttgtcatgtttaaggttgtccagatggctctctctttcccatttctgaggtcgactggatggctctagcctttccatgtctgaggccaaccagttggctctccttcccatgtctaaagttaaccagatggctctcaccttgccatgtctgaggcagactagatggctctcgccttgccatgtctgaggtggacttgatggctcccaccttgccctgtctatggtcaacgagatggctctcaccttcccatgactaaggtggaccacatggctcttgatttgccatgtctaagctagatgagatgcttcttgccttaccatgtctaagatggatctgaagcctcttgcattaccatctctaatgttgaccagatggctcttgccttgccatgtttgaggttgaccagatgcttgttgccttgccatgccttaagtagaccatgtggctctcaacttcctatgtctaaggttgaccaagatggctttcaccttgccatgtctgaagtggacttgatggttcccaccttgccatgtctatggtcgaccagatggctctcaccttcccatgactaaggtaaaccatatgtctcttgccttgccatgcctaaactagaccagatgcctcttgcctttccatgcttaaggtggacccaaacccttttcgcatttccatctctaaagtcgaccggatggctctttccttgccatgtctgaggtcaagatgcctcttgccttgccatgtctgaagtagatcagatggctctcactttcccatgtctgaggttgaccagatggttctcaccttgctatgtctgaggcagacttgatggctcccaccttaccatgtctatggtcaacaagatggctcttgccttcccatgactaaggtggaccatatggctcttgccttgccatgtctaagctggacaagatggctttagccttaccatgttgaaggtggacctgaagcctcttgcattcccatctctaaggtcgaccagatggctgtcatcctgccatgtcaaaggtcgaccaggtggctgtcccttgtcacttctaaggttgaccagatggctcttgccttgccatgtctaaggctgatcagatggctcgcaccttgccatgtcgaaggtcgcccagatggctctcatcagcagcagtactgttcaagtccagtagcaggatgtgatgattcactgcaacttcagtctctgtagtctcacctgggcagtcttcgtgtctcagcctcccgagtccttgggactactgggaccttctttcactgttctattcctaacctgacatttagtttatttccacagtacttagagtgacttgctattgtttttcttctttgttcttttgtctgttttcctatgctctttcctgtaaatgaagttgaccttttagattttcctttgtcacactccagcctgggtatcacaaatggagagaaaaagagaaagagaggagatcttaatggtgatattaattaccttttaccttggttcactcccacttatttatacattgttctttaatattgtttatttttttgtttttgtaaaacatttactgttggattgtttttgtttttttgagacgtatttcagcaactagagttggacttagccacaagagtgccatgtctaaggttgaccagatggttctcgccttgtcatgtctaaggtcgaccagatggctcttgcaggcggcagtaccgttcaggtccagcagagggatgtgatcgtgatttactgtggcttcgatctccctggtctcacccgagtggtcttcccttctcggtttcccaattacctgggactactcagaccttcttcctctgttgtttttttctaaacccactgtcagtttgtttccacagtacatagaatgacttgcgttgttttccttcttcattcctctatttttctacactccttccagcatgataaatatgaacccactccagtctgggtgttacaaacagagagagagagagagaggagaacatcttaattgtgttatcgattacttttcacctttgttcactcctatttattgacacaatgttatctttttttattgttaaatattcactggtggattttctgcttacttattttgagagagatgtcagccacgagcattggaccaaggtcaaccagaggacttttgccttgccatgtctaaggtcgaccagatggctcttgcctccggtaataccgttcaggtccagcagagggaggtaattgtgattcactgtaaccttgatctctccagtctcacccggctggtgttcccatctcagccacttgagtccctcagactactcggaccttcttttttttctctaaccccactttcagtttgtttccacatacatagagtgacttgctgttttttttttttttcctttgttcttttctctcgttatgtccctatgctccttcctgcaggaagcagttgacttttatatttcttttaatcacactctagcatgggtttgacaaacagagacagctagagagtaacagagaagtagagagatagaagatcttaattgtgatattaatcacctattacctttgttcactttcacttatttacttattggtctttaaagttgttattatttctttgttattgttgaatatttactgttgaaatttttgtttatttattttgagaaacgtgttggcagcgagcactggacttagctttcatcttgccatgtctaaggtcgaacagatggctcttgccttcccatgtctgaggaccagatggctctcaacagcatcagtaccattcaggtccagcagagggatgtgatccttattctctgcagcctcgatctccccggtgtcatctgggtggacttcccatcttggcctcccgagtccttcagactacttggaccttcttctttttttttttctaacccaactttcagtttgtttctacagtacttacagtgagttgctgttgtatttcttctctgttcttttctctctatatatattcttaccctccttcctgcatgatgaatttgaccttctagattttttttttttggaacaatccagcctggttgtgacaaatggagaaagagagagaagatcttaattgtgatataattgacctttcacctttgttcactcccacttatttatttgtctttaatattgttatggttagttctttgttactgttaaatattccctgttggatttttttcttttgagacagatcttcccacgagggttgtatttagccaccagcttggtaagtctagggtcgagaggatggctctcagcagcagcagtaccattcaggtccagcagagggatcggatcgtgattcactgtgccctgggcgtcttccaggtctctacagggtggccttctgatgatctcggcctcctgattccctcagactatttcgacatccttcctttgtttttcctaaccttactttcagtttgtttccacagtccttagagtgactttctatttttttcttgttttctctttatattttcctgtgctccttcctgcttgatgaagttgacagagagaaatcgagagtgagagatagaaagagattagaagaatttaattgtgatattaattacctgttacctttgttcactcccatttatttgtctttaatattgtttgtagttatatctttgttattgttaaatattcactgttggatttttttctgtttggagtgaacaaaggtgaaaagtaattaataacacaattaagattttctcctgtctcgctgtttgtgtctgtctgtctgtctctctctccaagatgtcagctgagaggattggacttagctgccagcttgccaagtctaaggtcaaccagatggctctcaccttatctaaggtcaaccagatggctctcgccttgccatgactaaggatgaccagatggctcctgcctttggaagtactattcaggtacagcagagggatgtgatcatgattcactgtggtctcgatcttcccagtgtcacccaggtggtcttcccacttggcttccctagtccctcaggctacctgaacttatcctcctccttcctttttttcctaaccccactttcaatttttttttctacagtgaaactaactgaagttttagagagacttgctgttgtttttcttctttgttcttttctccctttttctacactcattcctgcatgatgaaattgaccttttatatttttttgtcacattccagcctgggtgtgacaaatggaaaggggaagagagagagtgagagatagcagaatattttaattgtgatattagttaccttttacctttgttcactcccacttatttattggtctttaatattgtttggtattatatttttgttattgttaaatattcactgttggactttttgtttattttgagacagatgtcggcagtgagcactggacttagccaccagcttgccaagtctaaggtcgatcagatggctcctgccttgacatgtctaaggtcgaccagatggctctagctggcgccaggaccattcaggtccagcagaggtatgtgatagtgattccctgtggcttccatctcccctgtctcgcctgggtggctttcccatcttggcctctggagtccctgggactactcagaccttcttcctctgttttccttctaagcccacttttagtttgtttccacggtactcagaatggtttgctgttttcttcttttctctatttttctatgctccttcctgcacgatgaagttgatcttttagatttctgtcacactctagcctggcatgacaaattgagaaagagagagagaggagaaaatcttcattgtgataatcttcattgtgataattatcttttacctttgttcactcccacttatttatttattggtccttaatattgttattatttttcgttattgttcaatatttaccatcggattttttgtctatttattttgagaccaatttcggctgcaagtgttggacttagccatcagcttgccacgtctaaggttgaccagatgcctcttgctggtgacagtaccattcaggtccagcagagggatgcattcccgattcactgagaactcagactcccaggttttacccgggtggtcttcccatcttggggggccccccgtgtacctgagactactcagaccttcttcatctgttttttgctgttcttgttgttgttgatcttgatggagtctcactctgttgccaggctggagtgcagtggctgatattggctcactgcaacctccacctcctgggtttaaatgattctccttcctcagcctcctgagtagctaggactacaggcatacgccaccaagcccagctaatttttgtatttttagtagagacgggatttcaccatgttggccaggatggccttgatttcttgacctcgtgatctgcctgccttgacctcccaaagtgctgggattacaggcatgagccaccacgcccagcctctgtttttttttttttttaacccacttttagtttgtttccacagtaacagtacttagagtgatttgcttttgtttttcttctttgttcttttctctattttcctacattccttcctgcacaataaagttgatcttttagattttttattttgtcacacactccagcctgggtgtgacaaacagagagacaggggagaagatcttaattgtgatattaattactttttacttttgttaactgcaacctgtttatgtattgttctttaatttttttgtcattgttaaatatttactgttggatttgtttatttattttgagagagatgtcggctgtgagcgttggactaaggtcgacctgatggacctcacctctcgccttgccatgtctaaggtcgaccagatctctctcgccagcagcagtacaattcaggttgagcagagggatgggatcgtgattcactgtggccttgatcttcctggtctcgcccgggcggtcttcccaactggcctcccgtgtcccttggactactcagaccttcttcctctcttttttcctaattccactttctgtttgtttccatagtacttggagagacttgctattcttttttttctttgttcttttctctctctcttttcctatgcttcttcctgcacggtgaagtttaccttttaattttttttttttaatcacactcaagcctaggtgtgacaaatagagagaaagaaagagagagagagaaggtcttaattgtggtattaccttttaccttcattcccacttatttattgatctttcatattgttattatttctttgttattgttaagaattcactcttgtattttttgtttatttattttgagacgaatatcggccataagcactggacttagccagcagcttgccaagtctaaggacgaacagaaggctctcactttgccacatctaagagctacatggctcttgtccattacagtaccattaaggtccagcagagagatgcaatcgtgattcattgtgacctcaatctccctggtctcacctgggtggccttctcatctcagactcccaattccatcagactactcggacattctctgttttttttctagccctactttcagtttattttcacagtacttacagtgacttgctgttgttttcctcctttgttctttactctattttcctacgccccttcctgcgcgatgaagctaaccttttagagtttttttgacacattacatactgggtttgacaaatatatatagagagagagatcttaagtgtgatattaattacctttaactttgtttactcccacttatttggctgtttattgttctattattgtttattatatttttgttattgttatgttgtttgtttgtttggagaaagggtctcactctgtcacccagaatgactgcagcctcaaccctttggacttgagtaatcctcacgcctccaatgcctcccctttccccagtacctgagactacagacacaagccaccacaccagttgacttttgtattttttacttctactttttttattattattattttcatgtcttgagacagagtcttgctccatcggccaggctagagtgagcaatggtgtgatcttggctcaccacaacctctgcctaatgggttcaagtggttcttctgcctcagcctcctgagcagctaggactacaggcatgtcccactacaccaggctaatttttgtatttttaaatgtttgatggggaagtatgtgtaaagacagggttagaggttctgccatgttgcccaggctggtctcaacttcctctttttttttctcttctaatccaactttcagtttgtttccacagtacttagagtgacttgctattgttttaggttttacgttcttctctattttcctatgctcctttttgcatgctgaagtttacctttcagattttttctttttgtcacactccagccagagtgtgagagaaagagagaagattttaattgtgataattatcttttacctttgttcactcccacttatttattggtcttattattgtttgttattatttctttgttattgttaaatatttactgttgtgtttttttgtttatttattttgagacaggtgtcggctgtgggtactggacctagctgctagcttgctacatctaaggtcgaccagacggttctcaccaccggcagtactgctcaggtccaacagagacatgtgatcgtgattcactgtggcctcgatctccctggtcttgcctgggtggtcttcccatctcagccttccgagtagctgggactactcggacaattttcagtttgcttccacaatacttagagggggttgctgcttttttcctttgttctttgctctctctctctgttttaagttttttacactccttcctgcacactgaagttaatgttttagatttttttgttggggggtgagggctaggtcttctcactctgtcacaccctggttggagtgcagcttgtgcgatcagcagtgagccatgattgcacatctgcactacagcctgggtgtgacagtgtgacacacaaagatcgagagagagagagagagagaaagggacagagagagagagagagacaacaattatgatcttaattgcctatttaccttagttcattcccacttatttggttgtttattgttctattattgtttgttattgtttctttgttattgttatgtttattttatttttattttttatgtgtatgtatgtacagacagggttctgggttctgccatgttgcccagcctgatctcgaactcctgcactcaagcaatcctcctgcctcgactacccaaactgctgctattacaggcgtgagccactgtgcctggctcctatctatatacctatctatctacttatcttttgaggagagatgtttcttttttaactttaattataataataattattattagaggtgttgtctcacatctcctgggcagcaattctccagccttgtcctcccaaactgctgcgattacaggcatgacctgccatgcacggtctggttatatttttgatgtatttattctttccagtcctcgtttccactttgggtgcatatttgataatatggggattgaaaacaaatattttgagagagatcaatctcacaaacctgcctttcctttctagtggcacaagcctcatcaggggtagtgtgcctgatctctggtggttttaaatagtgtagaaagcattgctatatgtattttccctgccagggagtcccaaaaaacagctagagaagcaaattatagaagagaaagaggtttataattaaagtgagggtcagaaacttttgtagataaggctgattttagccaagatttgaaggagagattccttcattcaacagatgctgcagtctacctgatatgtttcaggtactcctatgaaataagagtacaacagtgaacaaacattaaacacaaagtttttaatctagtgaggcagagaaacttccctcaaattatcatacaaatatgaacttccatgaaagcaaactcagtgtccagtaggaaaattgtgaaattatgaaatgttattttgatttaatgtatagccattgaggttctttcaaataattataaaatgatcacaataacaacaggtattttaaaagtgtggtataaaagtacagagtataatctttgttttataaaaataaatgcatatttacctctgcacagaggtggttctatgccatgctaaactggttatccctggtgatgagattagcaatcacagactatgttctcataaaagaataatgttttagtcaggaggcaagcaaatttgtttttccactgtttgaatttacaattaaatactttgcatgctttaaatgtaacggaagttttgttatatactctgattctcatattaggctgtttcattttaattttgacattggcagggaataaggtgaaggtggactcttcttgttcagtggagcacatgtggtcctggagaaagctgtcacacagtggactcagagatgtggtccacgggcactaatttcctctcagtccctgcctaagcaagattcatcttcctctgcctgctgtttcatttttttcttctattgtctggtatatcttaagataaaaacttgtttccaaagggaaagtttcagaaatgtttctaagaataataattcaagttggatttccaagtagtattcctgggcaactgattaaattcttttgtcaataatcaaaatctggaatgtcctggattagttccaccatttcatcatgataactccctcttctataatccctaccagaaatgattgctttgcttaaaagcttttccctgagaagacactggtgtgttatttctttatcagcttatgaaaattaattctggttgggtacagtggctcatgcctgtaatcccagcactttgggaggctgaggtgggcggatcatgaggtcaaaattgagaccttcctagccaacatggtgaaaccctgtctctactaaaaatacaaaattagctgggtgtggtggcatgcgcctgtagtcccagctacttgggaggctgaggcaggagaatcacttgatcctgggaggcagagggtgcagtgagccgagagagcgccactgcattgcagcctggcgacagagcgagactccatctaaaaatatatgtatattaattctacatatctaggatttttactgtgcctttgtgtttttttaagctactggttttctcaagttaaacattaaaagtattatggaagtactgatgatgtactcagaggaaaacaatagagcatataatttatttgttataaaatgtaaaagttctgcaagattttcctctgatttgtaaaatgttctctctcaagaaagtttttctttacgtcttacatttttttttattttaaagacccacagggttgcttaaagtgtgatagtcctgttgttgtagcgaagataattacacatacaacctggcttttgtggcatcttgcttaccctattttgcagaacacagataccaaaggttggccttatgaagctggagctatttttgcactgttatttcagaaatgctgaaagaacatcctactgattttctaatactcaaaattatacaataatatacttggacgtttaggtcttaaagacttttcatcatgagtttctgttaaaatctaatatgaaatgcagctgccatccagaatcttaacagtgtttgctgccagccaactgaatgacttattggaggaacgattcatgacttctgggcctgagggactggctgtcagggggctggtttgagcaaagctcttccataggtgactccatatttgcactgacagaagctcctattgcacagaattgtacaattattcagaaagagtagaaatcatgaatctacattttacctgatttcaaactggttgacaatttacttctgcagattatttttctcttctccacttaatttataatttattccatctatttttttccttttctgccaactattgtatttttctagggatagttgcaggaacgaaactgatttctatcagagtgcttattataattctattctattactctgtgaacaaagatgcaaaaatcctcacccaaatattaagaaatcaaatccaaaaatgtataaaaagaattatacactacaacccagtgagatttattacaggcatgcaaatctggttcaacatttgaatataaattaggctgggtgtggtggctcataccggtaatcccagtgcagtaggaggccaaggaaagaggatcacttaaggccaggagttcaagataagcgcagacaacatagcaagactctgtcttttaaagaaattagttcatcatattaagagatataaaaagataatatgatcttatcaatataatcagaaaaattatttgacaaaattcaaaatctattcatgagaaaaccactctgcaaactaaaaatagggaaaaacttcctcaatttcaaaagaatgtttattaaaaaaaacctacatcttacctcatactaaatgtagaaacactagatgccttcctgctaagatcaggagcaaggcaaagatgtctcctctcaccattcctatacaacattatactgtaagccccaggtaatacaatgacaagaatagaaaaggtacatagattaggaaggaagaaataaaactgtctttttacacagatgatataattgcctatggagaaatctgaaaggatcacaaaacaaaatcttagaataaccaattataatgagcaattataccaactttgcaaattataagaaaatgtaaatgtcaattattgtcctacatattagcagtgtaattagaatctgaaatttaaaacaatgatatttatgctagtaccaataacaataaaatacttaagtgcaaatctaacaaaataaatataaatataggactttattcacttcaaaactgtgaataaaaacatcaaagaagatctaaataaatagagagaaaattcacattcaagaaacattcaactttgttaaaatgtcagtacctcccaactttacatgttcaatgcagtcccaatcaaaattccacaaagttagtttgtggatattgacaaactgaccctaaagtttatatgaaaaggcaaaagacccagaatagcccagaaaatattcaaaaagaacagttggaatgacactacccaactgtaagaactactataaagctacagtaatcaaaataacatggtactgttaaaaataatagagaaacagataaacgatacaaaagagaaaggtcggaaattgacccacacaaatatagtcagcttatttttgatgaaatggcaaaggcaattcaattgagagagaataatttttcaaaaaacagtactggaaaaactagacatccacatgcaagagaaaagaaaaaaaaaatcctaaacccagacctaacaactttcacagaaattactcaaaatggatcatagctcaatataaaaggaaaacccacaaaacttttagaaaataacaaagatcagaatctgaattacctcaggttttgctcctttctacaacacccaaaatattatccatgaaaggaaaatctgctaagttgaactattttaaaaataacatttctgcactgccaaagatgctgttaaaagaataaaaatgcaaaccacagaataaaagaaaatatttgcaaaacacataactgataaaagactggtatccagaatatgcgacaagaaataaagaactcttaaaacgcaagaataagaaatgaacaacccaattataaaattgcaaaagatccagataccttactaaagaacatataagcatggcaaataagcatatgaaaatatgctcaacatcatatgtcattaggaaattgaaaataacaatggcatactgccacacacatattagaatggctaaaatccaaaacaatgactacactaaatgctggtgaggatatagagtaacaagcactctcatttatcgcgggtgaatatgcaaagtgctatgaccagtttggaagacagtttgccggtttcttacagagctacacatacatttaagtgcaatccagcaatcacactctgtggcctttatccaaaagaggtggaaactttcatctacacaaaactcttcaccctactattaagaagagttttatacataattgccaaaacatgaaaccaaccaagatattcttcaataggtaaatgaataaactaactggggtgcaactatacaacgaacattattcactgataaaaagaaatgagctgtcaagccttgaaaagatatgaggaaccttaagtgcatatggttgggaaagaaggaaatctgaaaaggctacatgctatatgattccaagtatatgacattctgtaaaaggcaaaaccaaggagacagtaagaagatctgtggtatccccaagtttggggggaagaagggagagatgaataggtggggtacagcatatattttaagacagcaaaactattctgcataatgcagtaatggtggatacatgtcatgtcattatgcatttgtcaaaatccatagattttaaaataaaaaaaaccatgaatttgaatgcaaactttagatttcagctaataataacttttctatattagttcattaacagtaaaaatatgccacaccaaagtaaggtgttaataacagaggagaagctgggtgcagggagaggatacatggaaactctgtgctttccacttaatatttatgtaaacttgatacttaccaaaaaaataaagtataaaaaatatcccaatgattactatcaaaagtagactggatttaaaaattatactagttacaaatatgtgactgaatatagtcctatgcagcaattaaaataaataaactcaggtgttaaatgtcatccccatgatcgtaatcacaaaaaagccatagaatatacacaaaagaaaataaaaagtgtaaatgtttcaccagaaaaaatcaaccaaacaagaagaaataatgtagaaaatacaaaactagaagatgtaagatatacagaaaacaaatagcaaaaggacagaactctctacttttaagtaattattttaaatgtaaatgtattaaactatccaattaaaaggcagaaatcagcagaacagactataaaacatgatctaactatcttgtttttacaagattcacattagattcaaagatacaactaggctgaaagtaaaaggaagaaaacagatatttcgtgcaaacagtaagcaaaatagatttgggttggctatattaatatcagacaaaatagacttaaaatcaaaaatcttacataaaaatacaaagacactgtgtattcacaaaagtccctttagcaagaagatataaatattataagcatgcatgtacctaataataaaccactaaaatatatgaagcacaaatcgacagaattgaagagagaagtcgacagaattggagaagtcgacagttctaaaataatagagatgataatactccactctctgtaatgaacagaatcaccagatagaagataagttagaaataaatggcttatataatacaacaaaccaactaaatttaacagatacatatacaggatactccacccaacaacagaagaatacacactattctcaatgtccatggatcacacatggacattctccaggatggactgtatgttatgtcacaaatcaagtcaataacagaaggaaaactaaaacactcacaaagttgtaaaatttaacatactcttaaacaaccaataagtaaaagaaaaaaactcaagggaaattaaaaaatacagagaatggaaaatgaaaatacaacataccaaaagttatgagatgcacaaaagcagtgtgaagatcagaaatttatagctataaacacattaaagaagggccttggctgggcgtggtggctcatgcctgtaatcccagcactttgggaggccaggcaggtggatcacctgaggtcaggagtttgaaactagcctagccaaaatggtgaaaccttgtctctactaaaaatacaaaaattagccgggcatggtagcgggcatctgtaatccaagctactcaggaggctgaggcaggagaatcgcttgaactcagcgggtggaggttgcagtgagctgagattgcaccacttcactacagcctcggcaacagagtgagactctgtcaaaaaaacaaaacaaaaagaagaagaagaagaagaagaagacgaagggtctcaaatcaataacctaactttatgacctaacaaattagaaaaagaatgaactatgcacgaaataaacagaaagaagaaaataatgaagatcttagtagagataaagaaaatagagaccagaaaaacagaaaaccaacaaaaccaaaagttggttcttggttcttcaaaaatgttgacaaattcacaaacttctagctacactatgaaaaaaattacagaatactcaaaatagtagaatgagaaatgagatggggacattactactaattcttctttttttttttttttttttgacagagtctcgctctgtcaccaggccggagtgcagtggcccgatctcagctcactgcaacctccgcctcccaggttcaagcgattctcctgcctcagcctctcaagtagctgggattagaagcatgcaccaccatgcccagctgatttttgtatttttagtagagacagggtttcaccatattggccagaatggtctcaatttcctgatctcatgatctgcctgcctgattctaagaaataaaatgttttaaagagtgtactgtgaacaactgtgtgacaacaaaatgaacaatctagatgaaatggacaaatttctaggtataaaaaacctagcaagacttgattaccaagaatagaaaaattgaattgatccataacttataaggaaatcaaatcaaaaatcaaaaacctgctgacaaagaaaagcccttgacctgatggcttcagtagttaattctaccaaacattttgaaagactgaaaatctttttcaaactcttccaaaaaattgaaaaggagagatcagttccaaactcattccacaatctcagcattaccgtatatcaaagccagaaaaagacactacagaaaactacagattaattatcccttatgaacacagatgcaaaactcaacaaaattccagcaaataaaattcagcagcatattagaaagatgatctcaccatcttgaattaatttttgtataaggtgtaaggaagggatcgagtttcagctttctacgtatggctagccagttttcccagcaccatttattaaatagggaatcctttccccattgcttgtttttctcaggtttatcaaagatcagataattgtagatatgtggtgttatttctgagggctctgctagacctaaaactataaaaaccctagaagaaaacctaggcattaccattcaggacataggcatgggcaaggacttcatgtctaaaacaccaaaagcaatggcaacaaaagccaaaattgacaaataggatctaattaaactaaagcgcttctgcatagcaaaagaaactacatcagagtgaacaggcaacctacaaaataggagaaaatttttgcaacctactcatctgacagagggctaatatccagaatctacaatgaactcaaacaaatttacaagaaaaaaacaaacaaccccatcaaaaagtgggagaaggacatgaacagacacttctcaaaagaagacatttatgcagccaaaaaacacatgaaaaaatgctcaccatcactggccatcagagaaatgcaaatcaaaaccacaatgagataccatctcacaccagttagaatggcaatcattaaaaagtcaggaaacaacaggtgctggagaggatgtggagaaataggaacacttttacactgttggtgggactgtaaactagttcaaccattgtggaagtcagtgtggtgattcctccgggatctagaactagaaataccatttgacccagccatcccattactgggtgtataccctaaggactataaataatgctgctataaagacacatgcacacgtatgtttattgcggcactattcacaatagcaaagacttggaagcaacccaaatgtccaacgatagactggattaagaaaatgtggcacatatacaccatggaatactatgcagccataaaaaatgatgagttcatgtcctttgtagggacatggatgaaattggaaatcatcattctcagtaaactatcgcaagaacaaaaaaccaaacactgcatattctcactcataggtgggaattgaacaatgagaacacatggacacaggaaggggaacatcacactctggggactgttgtggggtggggggagcggggagggatagctttaggagatatacctaatgctaaatgacaatttaatgggtgcagcacaccagcatggcacatgtatacatatgtaactaacctgcacattgtgcacatgtaccctataacttaaagtataataataataaaatttaaaaaaaaagaaagatgatctcaccacgaccaagtgcaatttattcttagaatgcaaggatatcttaaaacatgaattttttaacatataaaaattgatcaatgtgtacacattaacaaaataaaagaaacattgatcacctcatggatgcagagaaaagtattttatgaaattcaaaatcttttcagggtgaaaacactcaaaaaagtaggaattttaaaactaaaatactaccattgtgaaatccacacattaaaaaaccacatcaaacaatgtactccagggtgaaagacaaaaagcttctgctctaagctcaggaacaaggcaaaggtgtctgcttttgctatttctattccacatagtgttggaagttctagtcaaattaagaattaaaaagaaacaaactatccaaattggaaatgtagaggtaaaattactctagcctacagataatataattttatgtggaaagctctagagatttcacagatccacacaaaaagtattacaactaataaattcagcatagtagcagcatacaaaattaacatgcaaatatcacttgtgtttctatacagtaatgatgaataattagaaaacaaaactaagcaaacaagcacatttacaatagcactgaaaagaataaaatacgtcgggagtaacaaaaaaagcaaaaaattctattttgcagaaatagaaaaatcctacctaaatttcatatggaatctcaagggaccccaatgagtcaaaattatcttgaaaaagaagtccagtgttacaaaatgtacacttattcattccaaagcttaatacaaagttccaaaatagtgtggtactggcaaagagacacacatatggacactggaacagtataaagcagcatatggtcaaataatttttgatggggatacaaagaccgttcaatgggcaaaggactgtctttataacaattggtgctgggaaaaaatggatatccacaagcaaaaggatgaagttgaacatttaccctacaccataaacaaataaaaatgcatcaaagacctaaaggtaagaacttaaagtataaaatttttgaataaaatataagtagaaaacatcatgacaatatcacaaatataatgacacatttaaaaaagtagatgtggccaggcatggtggctcacgcctgtaatcccagcactttgggaggaggaggcagccggataacgaggtcaagagattgagaccatcctggtcaacatggtgaaaccccgtctctactaaaaatacaaaaatcagctgggcgtggtggcgcatgcctgtagtcccagatacttgggaggctgaggcataagaatcgcttgaacccaggaggtggaggttgcagtgagccgagacaggccacggcactgtacagcctggtgacagagcgagactctgtctcaaataactaaaaaagaaaaaaagaaaaagtaggtgtaaaactatccatagtagatactctcatttacataaaatccagtaagaaaacaaaactgaagttctggcttccggtaatactggagtagcttgctaaactaacactctcacagataacaatgatacaatctggataaaatattatatatagttacatagaaacattcatctatatacaatacatacatacgtgtgtgtgactgaatgagaatttcaacctttcccaccgtagggaagataattattctgtttgaattcagccacatttaccccctcttcaaataataacaatgctcttccaaagaatacaacagaatttagtctctataactaatatttataatttctattacacaatattaaaattcataaaatgtgtgaagaaatgtaacatgcaaactatacacaagataaaaagcaggcagcagaagctatttctaagatgtccgagatgatgtaatcagcagacaagtatttcagggcagctattataagtacgttcatgggggtaaaggaaaatattctcataatgaattaactcatgtagagtctcagcagagacatggaaattataaaaagagtaaaatagaagacaataaaataataaaataaaaagaacttttagtttacagagtagaaacagaagacagcaatataaaccatccaatctgaagactgaaacaagtttaaagaaaatgaaaagaggcctaagagacctgtgaaatgattgagtctgagacagagagggagagacagaaaaattaaatataatacaaaaacaaataaacaatagctgaaaatttaaaaacttggtcaaaaccgcaaattcttatattcaaaaggtgaacacactccaaaacaaaaacaaaaacaaataaaaccatatcgaggccctactgtgatttagaaaactggcagagcaagattttccagggagttgctatgatttctcattttcactatttataataatggaaaatatgcactccttagttttcttcttggagaaagtctgacttgtcaaacacagatgacttttcagtttagttttcaaggtttaatttcttaccttggaaatcaattaaatttgtttctttaaaatgtcgcagtaaaattgctcctccagacagatgtccacggagattctgtcctgctgcgtccgcctttcacagaactgaggttgttcctacaccagtttcagaagcgtgtaggcacgctttattacagtggcagcagcgtccctgtgcgaggtctaacccaggtgtgggccctgcagccagcccgggggtccaatgggtcctcctatggagcacaggaagaatcgtggcaggccagagatagacaaaaggtggcttttaaaagggaagtgtcaggttaccagggactgggtacttttacacgcggaccttcggccctgcccatagaaaggggcagcactgcgcatctctgaaggagtgtggcaaagggtggggcaataagaagggtggggcagaaaggagtggcccctcaggaggaaggggcggggagatcccagctactagaggacgcccgttccaatggcaactctgccaaggcgcctatgagagcctcttggcttttacctggtctgcgagaaatcaaactttgggcacaagtcatgaagccgacaagcccgggagacacagtgtcagaattacaaggtgagatcagccgcccggccaagctatcttctcgctagcaggtgaggcccgtgaacagccaagctccccttggcacggcggaaccgcagtggacgcgtggaggggctccgtagaggagggacctttgcttgggatgcggggagctgtagtctcttatctgcacccagcttgttagttgtacgcctgcaggactacaatctcagcacaaagcaggattgtagggcggtgcggatccctggagggagacagcgcggtgcgctcctgccggccatgctggctggggtggtgtcttaggcggttccagccgttagtcacagggcggccggactacaatcccagcatacaacgggagtggaggtggtgaccttgagagagggcctgtgctgtgcgcgcctcgcggggcatgctgggagcagtagcatcttagctgcttccggccgctggtcgcagggctgcgggactacaatcttcgcatgaaatggaagagagggtggtgcggatagcttgaggaaggtacggataccttgagggaggtatggatacgttgagggaggtacggatacgttgagggaggttacggatacgttaagggaggtacagcagcggtgcgcgccttgcagggcatgctgagaggaacagttttttaactgcttctggctgttggtggcagagctgcgggactacaatcccagtatgctacgggagtggggatgatgctggtcccttgaggggggggggcagcgcggtgccctcctgccgggcatgctggtaatagtgtcttagctgcttccggccgttggtcgcagggctatgggactacagtctcagcatgcgcagggttcaagggtgttgcgcagccccgcagggaggggcagggcggtgttgacctctgtttccaaacccatgctggctactgaatctgtgccacccctggctaaggggagtgagtccatagagggacttgaagggcaggtctgggctgggcagtgaggagagtatgatactgcaaagtgcgcctcgcctttgccaaaatcggtcgggtctcaggctcaccccacctcccgctgctcagttccgtttccctccagagcatcaagcctcctcccgcccagggggcctcctgctttcctaagctgctgtggaatcggcctgaggtcccagacgctgtccattgtgctgctgctctctgctttctccagccagagtgccagttcatccgcttttgggagaactccgccgcctggcctgcccgcggaaaaggtcacagctttgcagggggtgacatgggctatggcttcctggaaatgtcaccctcactagcgccttttagatagatgtgaattttgagacatgagggagagtaattattggtttacccaggagatgctaagagcagaggagaaaaccctaatttccaggcatgtgtcctgagccagggacaggctggccagaccctaagcccccagtgccgccagagagcagcctactgccctgatttgtgtggaatccccttcgtgctgctgggccttagcgtcagggacagcccagtcaggtgaaggtggggatgacccatgggcttctggaagtgggttggtggtcctgggagggccagcccatccccccttggagagggtctttgtgctgaaggatgcccacagaggcctgggtaccaggaacactgctctaggcaaggtgcctttcttccagatttggctgaaaggaaggaagacttggtcagcttttccacccagccatctggcccttacagggctgctccccatggacctgggtttgtagagtcctccagggctttgtgtggcccactagttctgatactgaggacacccctgcaggctgttaatttcagaacaaggggtgtgtgcagactggggcatgggtgctgtcagggtaccccaggctgctccagggacggtaccccagtgttcaacttggcttggggccccctgcctcatgcccttactccagggctgcttggcctgggcttgagccatggtccagaactcaggtggccccattgccacctaatataagggcctgtctccacagtgggtgagacgcccctgggcactgggctcttcagtcatccagggctatccactccatggcatgagttcccacattcagctgaactctgtctggctctggactggggtccctcctgtgccctttccctgaatcctctctgggtccgagacactgatcctcttcactctctggcttaaggcttgttctcctgacctccttggaggggtgctcaggattgaggacccctgctgttctctggggctgttggtactcggaggtgtgggtgttggcttgcactgagaagtccaaccccttcagtgcccttcaggggtcctttaagagcaggagtgatagggtgtgggggagtgccttagaggggtcttgccctcatcccctgccctgtctctgagacgtgtccagtaaacctgaggtcagcacctcaggaatgaaataatgtcttttgcagcaacttgaatgaagctggaggccattattccaagtgaaataactcaggaattaaaaatcaaatgccatatgttctcacttataagttggagctaagccatgcgtatgcaaaggcatgcggggtgacataatggactttggagactcagacatgagggtggcaggtggatgaaggatgaaaaaactacctgttgagtacaatatatactactcaggtgacaagtgcactaaaatctcagaatccaacactatataattcattcatgtaaccaaaaaccacttgtacccaaatgatattgacattaaaaaaaatttaaaactaacaaaatttataataaaagctttttaaaaaataaaaaataaaaacagtgtcaaagtgttaatttattgtgcattgcatagcaagccccttttgctcagtaccacactcactactggagaaacaaaaccttgaaaattaaagaagaacctgcacataaatgataattctgataagttatttatacactgcctacatgaatattacagatatgtgttaaagacaaagatctatgttagattgggtcagctttatgcttggtcattatatttccaattcttctctctcaaaatacaacagtcatgggttgccatggtgattattccaaatgcattgtgatcatatggaactggtgacgtgttctcatttccctttcagttataaaataagcctgatgttcctagccatcaaaatctcactaacacctaactacttcagtttcaactgtggttcctatttcaagacaatcactcaaggttgcaaatcacagaaagacaagaatgttttcattaaccaaaacattaatcaaaaattataccccttgaggccatgtaatttggtttttatttagtttattgtctattcaggtccataaagcctacaactgcaacaatatatacagttcatgatgacttaatatttattgaatagtaaaattaatacatgttaagagtagatctggcttcaggtaatcagggctgaagtgatatgtgcagtggtcaaggacaaatgtcaatgtataatctgacctcctgcactcgaaacacacatcaatactttaaatgcctcagaagaaagtcacgtaggagaataaatgaaagaaaatagaaaagttgttaattagattaagaaggaattaaacctggttttaaaatagagagataaagacatacaatataaaaatactgaagaacaagtagcataggcagaggagcactaaaggtataacaggaaagaaatatatctaaaaatattagtttctgagttaagattgtagatgtagagacctgacaaaaagagttgttcctacacattaaccaaccaaacaaacaaaaaagctggagaaactacaaacgcatggtcgatttctcctgagccctttagagaactgaggtcatggggaagacaacaaactcaacatcagggcatgcaggagcctggccccaggctttcaagtgcaccctggtgaactggtataattaagccagaacatttgaactagttcctggtggctgtgtgtcagtgggtgaggagaatgagaaaccctggagtctacagacatagagtttacatttttctgtatattttttctaggaacactacaaggcctgttagagaagaaagggtagaatcccgagaatgttttccccacagtgctgataaggagagaccactatcccatctactgctacagctctggagacagagctctcccacctgtcatatagaacacaaggaccaatctgcagagaaagagcatccaaacctgatccagtggacactggggaaaaactcaccacagctgagtgtggaaaaacaaggccaacacacacatctctgcacagatacatctcccataaagaaactaaagtgttaatttacagggcactgttgcagacccacttcagctggaagctaggaacatggacaaggagcctctctaccaccaagggagagagaggaatgtgctcttgtcctggcattgcatccacaggaggggcaggaaattctttgaaggtcagtaaccccataccccaattaacagtgcttaagtgtgaggctccctcagaacatcagagatatcctcactccctcacccctgccaccaggctaagaagcatggagcaaaaaaaaaaaaaaaaaaaacagaacaaaacagcagaatatagctgggccaagtgcaagagaccaaagtataatgagagggatttgaattatttttttgacagagtcttgccctgttgctctggctggagtgtagtggcatgatgtcagctcactgcaaccgtcacctcccgggttcaagcaatttttccgcctcagtctcctgagcagctggtattacaggcgcccaccaccacgcccagctaatttttttgtatttttaggagagatggggtccctctctggtggtaaaattgatgagaatatgacactttttatcattaatctagtaaaaataaaacaaagtgttatttttctgatatagatttatacttcagtatatgtcaggcagactgtaaagaactctatcagaatattgataaaataatgcaacactaaatattaaatattatatacttatatataattattatattgcccaaaatagcatattctctaatgcgtattttgcagtaggtttgtaaatagcttctttctctcatgacaatctttcttctttttctaatgtctgatcaagcccatagactttataatcagtctttggttcctggtccatttaattaatggtggtgttttccctaacatccataattgtgcatatgctttgtggcttacagtattaagaataccccaatatataagtgaggataatgaagataaacttgatctgtattatctgccttctgagagtgctcaggggctttaccttcaaccgaagggcaagctggttgctacgtctcatagtgagtgctgagttttgcatttagattgataagtgtgtgctgtatccaatagaagcgaattcttctttacactcagatcgacctatgtgacttcatgggtttttgttctatttcactcgggtatgcccaggttttcagatctcatgactactttattttggagttgccagactcagcaaataaaaatacacgacacacagttaagtttaatattcagaaagaaaactgttgtggcaagtcagggaccccaaacggagggaccggctgaagccatggcagaagaacaaggattgtgaagatttcatggacatttattagttccccaaattaatacttttataatttcttatgtctgtctttactgcaatctctaaacataagttgtgaagatttcatggacacttatcacttccccagtcaatatccttgtgatttcctatgcctgtctttactttaatctcttaatcctgtcagctgagaaggatgtatattgcctcaggaccctgtaataattgcattaactgcacaaattatacagcgtgtgtgtttaaacaatatgaaatctgggcactttgaaaaaagaacaagataacagcagtgtttaggaaacaagatagatagccttaaactctgactgctggtgagccgggcagaacagagccatatttctcttctttcaaaagcaaatgggagaaatatcgctgaattctttctcatgatggaacatccctgagaaagagaatgtgtgcctgcgggtaggtctctgaactggcccccctgggcatagcctgtctcttatggtcgaggctgccgagatgaaatagactccagtctcccacagcgctcccaggcttattaggaagaggaaattcccgcctaataaattttggtcagaccagttgatctcaaaaccctgtctcctgataagatgttatcaatgacaatggtgcccaaaacttcattagcaattttaatttcgcatcggtcctgtggtcctgtgattgcgccctgcctccacttgccttgtgatattctattatcctgttaagtacttgatgtctgtcacccacacctagtcgcacactccctcctcttttgaaaatctctagtaaaaacttgctggtttttgtggtttgtgggccatcacagatcctaccaacgtgtgatgtctcccccggacgcccagctttaaaatttctcttttgtactctgtccctttatttctcaagctggccgacacttaggaaaaatagaaaaaaacctacgtgattatcggggcaggttccccaatagaaaacaaataactttttagtataactataaaataaacatttgcgtgtaatatttctattcccacctattatatattacatacatacacacacacacacacacacacacatccttttgcttacctgaatttcatatttaatgttcttggactttttttgttgacctcaatccataagaactgtagttctccccagtacagtttcagcaccaatgaccaagtctcatcagaggaggccacatgatgatctagcagatagactctttattcagtatgtgagagtcatttacagactggggacataaattagaaatgatgagctggatgtcttttagggtgaaaaattactaaatttctaatctatgttactttttctatttattctctctgttacataacctatgatacagacagaataataatataattctgatacatggttaatgaataattccacatatatatgtgatttatatccaaatattgctttacttgtagtggtttgttaaccttctaatgtggagatcattgagcctttccgtgagtattctcctggtgtttctcctgagtgccacatggcaacagattttaactgagctgagggcccaaatgtgcattgttgagaactatcaattgcttggttctggaagttgaaataaatatgtccctttattagattaagtgcttgaagaaaaagtaaataagatactgcaatttctccctataaactcatacatatcaggtatgcagtttcttctgtataaactcatacatatcagatatgcactttctcctttataaactcatacgtatcaggtgggtttagagcaatattctacctcagccattattctctgagtacaagccaagaatgcaaactgtcacatgatctgtattgccttgcatatttatgcttacgggccagagtagttttaactgacgttgaaaacagttgaacactcttacatctcacgggaggaatagagtgaatataaaagatttttctcagcattttacagctgaattgttctacatccagtattaaattgatttaataaaataatactgccagcatccaaagaagataccatgagaacaatttctgaattattcagtacaatttcataataatattttcatacggagatctctcaattaacatatgagagaaattgtctttattatttgagagcaaagtatttttgaagacatgagtgggtatctttatattaagtgaagtcttaagaaaaagatccccgtgtgagcattttaatgtaactttatgaatgccataaatttgaaaaatgtgttttttgttctctggaaaattgagagcaggactttttaacacttccattctgagacgttaaagagagttaatataaggggtctcatataaaaactaagctagaggagaaccaaagcgttttgaaaagatacagttagtacaactgtagggaccagccccacagggttggtgggtctctccccatgtgtggagacaagagagtgtgtagaaataaagacacaagacaaagataaaagaaaaggcagctgggcctgggggaccactaccaccaagtcgcggagactggtagtggccccaaatgccaggctgcactgatatttattggatataagacaaaggggcaggataaggagagttagccatctccaatcataggtaaggccacgtgggtcacatgtccactggacaggggccccttccctgcctggcagccaaggcagagagagagaggagacagagagaaacagcttacgccattatttctgcttattagagacttttagtactttcactaattttgctactgctatctagaaggcagagccaggtgtacaggatggaacatgaaggcggactaggagcgtgaccactgaagcacagcatcacagggagttggttaggcctccggataactgtgggcgagcctgactaatgttaggctccacaagaagtggaggagtagagtcttctctaaaccgcccccaccccgcggggaaagggagactcccattcccggtctgctaagtagccggtgtttttccttgacactgaggctaccgctagaccacggtccgcctggcaacgggcatcttcccagacgatggcgttaccgctagaccaaggagccctctggtggccctgtctgggcataacagaagcctcgcactcttgtcttctggtcacactcctcactatgtcccctcagctcctatctctgtatggccttttttttcctaggttatgattatagagtgaggattattataatactggaataaagagtaattgctacaaactaatgattaatgatattcatatataatcatatctaagatctatatttggtataactattcttgttttatgttttattatactggaacagcttgtgtccttggtctcttgcctcggcacctgggtggcttgctgcccacatacaacaatgttcatatcctaaactccagaatctgtgaatatcttaggtaatgtgacaaaggaaaattaagatatagatagtgtcaaggttaacaagcagctgacttcatgataaattatctttatcatgagcagaagcctcacgtaattagaagggcgcttaaatatgaaagagggagaaaaaaagaaactttatcacactgatgtgatattaggtcaactcaatgcaatatttttttcctaagaaaatttttggggattattttcccattagcataaagttcagttcagttgttcaaacacctgtgatttatttttacatgcatattactatggatggtgataattaaacaaaaaatgcagaaaataaagaaatgctttctgaagagtgagcccaggtactatattattatatgagtatagacaatgtggaccgtacatgtgattacatgtgattgtaaatgtgtggatgttttatatatgtataagtaatttgttgtataatatagtgctcaggctgcatttttaaaaatttgtatgaggtgggtttgatcaagataaatgggtgaaataaaaatgataaggttggtaatagttttgactatgcaataaataacattgatgatagaagtcttattgcgtttttcaaatatagaaaagatgattcctcttcatcattaagattaccatgttgcacttatagtaatataaaaaatgcccttttcttccaagctgtcatcagacttacagccaacaccttccttctcttccacatcttcacaacccttctggatcacaagcctaagtccactgaccacatcacctgtcacctggaccttgcacacttagtgatgctcctcattgcggtcttcttggcatctccagacctgtttaagtaactacatttgcagaataacttaaagtgcaaggcatttttctacatgtacagggtgatgaggagcctctccagctccatcacctttctcctgactgtgctccaggtcatcaccatcagccccagcacctcctggttggtgaagactaaacagaaattcacaggttacattttctactcctgtttcttcctatgggttctcagtttgtctctcagtagtaacctgctttcccccactgtggcttcttctaaagtgaccaagactgatgtgctaagtatcagtaaatactgctcactttcttacataagctacatcttctaatatgacaaagactgatgtgctaagttgtgctttatttcttgtcattctattattcctatacatataattacattcatattgctattattttctcttttttatatggttgtattcattctgctgaaaactccagttcactaatccagttcactaattctgtcgtcaactcagtctaattttatatttaactcacatattgtatattaaatttatttacttttaaattattccacttatatttgtctcttttccaaatttgcttgttcagtttatagttccctgctgtttcaaaattatttcgatatcctcttttccccacttgttttgacttaaagatttaaaatatatatccggccaagcacagtggctcatgcctgtaatcccaatactttgggaggccgaggcaggcagatcacttgatgtcaggagtttgagactagcctggccaacatggtgaaactttgtctgcagtaaaaatacaaaaatttagatgggcgtcgtggtgggcgcctgtagtcttagctactcgggaggctgaggcaggagaatcacttgaactcgggaggtggaggttgcagtgagctgagatcacgccaatgcactccagcctgggcaacagactgagactatctcaaaaaaataatataggtatttccaatatgccaagtttatgcagtgtctaatttcttcttaccccttttcctggtacctcattttcttctgtgcttcatacttttaatgaattaatttttgcaacaggatctggtttattctgccttggcagggtggtcctgagagtggcaggtgccaccctcttctgggcaaagggaggtccagaaggccagttagggccaatggtgggagaacctgggggtggagtggggttggggatttgggctacagcccctggaatgtggtgaaaccaggatgaggcccagaggcagctgtggtaggccagggcagggcggaaggcactggactggaaccaggcaaggtctacagggccaagatcccaggccacacgggcaccctgggaggcggagcacagtgtcccatgacacagagcatgaaacacaggcccagggctcacagtaagcacatgaacaagtggacacagattcacaggccagttgacatccagccatggtgggaccagaggtagacacggtgtcacatacagaccacagggaagacatggcacaatgggacagatggatgtgatggccacaatgcacagaccaggccacagagctcgagggatatgggaaggggccttttggcatttctgcactggaatcatgtgagacaagggtggccgggtgctctggaggtgctggggtggtcccctcacggcccctctgagcttactctgtcttccacactttgttgagcagcttcctcacctcatcatagatgataaacactatggccacatgcaggcagacccggcccaggcaggcaatagtgcccttgtagaaggtcttgtgcccttccctcaggatttgcagccacagtcccatgtgttctgcatttgtgcacctccaggtctcgcatctggggctcgatctcgtgcagaggagcatttccgaagacactggccgctcccacaatggctccgaagaacccagcgaccagcgggttcatgagtttgttggggctgtccactcggtaccagctgcgcagggatgtcaggacaaagaaacaagttgcctggttccagccctgcttcagcacggggcctgtggggccccggtaagtcccggtgttcccgcacaatctcctaaccctgtggaagaatcccctgtacttggatttggagaggtctggccatggattaacttcaccttgatggtctccatgggacataggaccaccacggcctcggccacgctagctcactggccgcaccgctgcccgccttgctgttcaccagtccctgggcatcccgcatctggttgctgaggaacgcctgacgccgccttgtggatgaagccgcagagcagggagctgaggctgcggcccaggcccaggctgccttggctgcgactgtgtgcctgcaggccccatgcccggtatccggtggatgcgagtgctagtccagctgcagctgcatcttcacgaactcggtggggaacgggatgcagattttttttttcttttccttccttccttccttccttccaacttccttccttccttcccctttctttctttcttttttttttttttttttttttgacagaattttgctcttgtcccccaggctggagtgcagtggcgcgatcttggctcactacaacctggattcaagcgattctcctgcctcagcctcccgagtagctgggattacaggcatgtgccaccattcccggctaatttttttgtctttttagtagagacggtgtttccccatgttggtcaggctggtctcaaacgcctgactcagatgatccgcccgcctcggccacccaaagtgctgagattacaggcttgaaccaccgcgcctggccctgtgatgtagattttgatgctgccagccaggctgcctgccgggatcgcctgccctggagcaggagcatcagccgtgcgttccaggacgcaggcatggcatgaccggcaggaggcggagtgcccggcgtctcttgggatcggagcctcctgaattccacgctgggaccttaatttggttttaacacaaataaagatctcacataaagataaaaggggatgtgttggcttgtaatttttgttaaaagcaatggtatatgttgtataggatagtgtattgggatcaacaggtttttggggttttttttcagcccactgacattgaaagggataaacagttttttggttattagtgagcagttttctctcaggccatagtgtaggggtttgtggtcatgtagatgagagataggctgggattaaaatttgttatggcagtaataagagcaacagagctagactctgtcaaaaaaaaaaaaaacatagttagtagaagaaaaaaatcataggattataggattagagcagaaaaaaataaaacaaaaactacaaaagattaatgaaaatatttggccttttagaaaagttaaaaattggcaaaccttcagcagactaaacattttttttttaattcaaataaaaaaacgagttaaaaaaggagatattacaacagataacacacaaattcaaagattggtttgtggctactataagcaactgtatgccaatacattggaaaatctaaaaaaaaaaaaaaaatagacaaactcctagagacatacaacctaccaagattaaacagtaaagaaatccaaaacctaaacagaccaataacaattaatgagattgaagctttaataaaaaaactcttccaggaaagaacagcccaggacctgatggcttcattactgaattttaccaaacatttcaagaagtaataccaattcctattcaaactattctgaaaaataaggaggagggaatactttcaaactcattctatgaggccagttttaccctgatatcaaaaccagacaaagatacatcaaaaaaaggaaactgcaggccaatatctctgataaatactgatgcaaaaatctcaacaaaatactagcaaacagaattcaacaatacattaaaaagattattcattatgaccaagtggggtgtatccctgggatgcaaacatagtttaatatacacaaatcaataaatgtgatatgtcatatcaccagaatgaggaaaacagcgtggtactagcataagaacaaacacatagaccagtgaaaaaggatagagaacccagcaacaaatccacacatttacagaaaactcatttttgacaaagatatcaagaacatacagtggggcaaagacagtctcttcaataaatggtgctggggaaactggatatccatatgcaaaagaataaaactggattcctatctcccaccatatccaaaaacaaatcaaaattaattaaacatgtgaatataagacctcaaattatataaaactactatatataaaaaagttgtgaaaaattttcaggacatcagtatgggcaaaaatttcttgagtaataccccacaaccataggcaacctaagcaaaaatagacaaatggaatcagatcaaggtgaaaagcttctgcacagctaaggaaacaatccacaaagagaagagacaacccacagaatgggagaaaatacttgcaaaccactcaactgacaagttaataatcagaatatagaaagagctcaaacaagtctatagaaaaacatctaataattcaattaaaatattggcaaaagatttgaagaggcatttctctaaagaaagcatacaaatgggaaacaggcatataaaagttgaacctcagagaaatgcaaatcagaactacagtgagatattatctcaccccagttgaaatgtcttatatccaaaagacagacattaacaaatgctgacgaggatgtggagaaaagggaacttttgtgcactgttggtggtaatgtaagttagtacaaccactataaaaaaaacattttgaaggtttcttaaaaaactaaaagtgagctaccatagctaccatgcaacccagcaatcccagtactgggtatatacccaaaagaaagaaaatcagcttgttgcttcactgtttacaatagctatgatttgaaagcaaactgtctaccaacagatgaatggattaaaaaaaatgtagcacatatatacaatggagtagtattcagccataaaaatgagattttgtcttttgcaacaatgtggataaaagtggagagtatgttaagtgaaataagtcagacacagaaagacaaacttggcatgttctcacttacctgtgggatctaaaaatcaaaacaattgaacccatggacgtggagagaagaggttagttttcttaacctctttgagaggttaagcaagatagtaggggctggcggaaaggtggggactgttaatgggtacaataaatagaataaatataacctactatttggtagcacaagatgactatagtcaataataatttaattgtacattttattttatattttatattttattttatatattttattttattgaggtagagtcttgctcttgtcacccaggctggagtgcaatggtgcagtcttgtctcactgcaacctttgcctcccaggtttaagcaattctcctgcctcagcctcctgagtggctgggattgcagccacctgccaccatgcccagctaattttttgtatttttagtagagatgggttttcaccacatgcccagccaattgcacattttaaactaagagagaataattagactgtaagacaaaaaataaatgcttaagtgggggagggtgtatcccattctctatgatgggagtattatgtatttcatgcctgtatcaaaacatctcatttatccccataaatatatacacctactgtgtacccacaaaagttaaataaattaaatttaaaaaattaaaaaataaaatagcatagaattaagtaggcccagaaatatgaggattttaatgaaatgataatacctaagtaataatcaatcaagaagtaaaaacaaagtcatacttcactcccatttttgtttctaatctatatgttttctactttaaagctgtagaattttctttttttcattgctaattatattttaatgtgactagtctgggtctattttttctaaaattttcagtttttctatataatttttctctaacttttagtttctttgtttatgccccttatatttttgagaagtgtctattcagatttttgcccattttaaaactggattatttaattattttctattgagttttttgtttcttttgtattctgcttatcaatcgcttgtcggatgtgtagcttgcacatattttctctcttatctcttttttctttttgagacagagtctctctcatcacccagcctagtgtgcagtggcacgatctcagctcactgcaacctctgcctcccagattcaagcgattctcctgcctcagcctcccaagtagctgggattacaggcgtgtgtcactgcgcccagctaatttttgtatttttagtagaaacagggtttctccatgctggccaggctggtcttaaactcctgacctcaggtgattcacctacctcggcctcgcatagtgctgggattacaggcataagccaccatgcccagccttattttctctcattttaggaattgtctcttcattttattgattgtttcctttgctgtgcagaagttttttgtatgatgtgatctcatttgtacattttactctcattccctgtgcttttgaaacattatttaaaaatctttgctcagatcaataacccgcagtgtttttctaaggtttttttgtggtagttttatagtttcacgtattcgatttaagtatttaatccatttctatttgatttttgtatggagtgagagataggggtctagtcttattcttctacctatggatattcagttttcccagcatcatttacagaaaagaccatcatttatccagtgtatgttattggtgtctttgtcaaaaatgagttcactacaaatgtatgaattttcttctggattcactattctgttctattggtctacatgtctgttttaatgtcagtaccatgctgttttggttagtatatctttacagactattttgaagccaagtagtgtggtggttccagttttgtttggttttgcttttgcttaagatgcctttgaatattcttttatgtggttttatataaatattagaattttgtttctacttctgtgaagaatgtcattggtattttgatgggattgcattaaatctgtaaattgatttggcagtatgaacattttaacaacattgattattttatttcatgcaatataaaataccttttcattttgtttcatcttctttaatttctttaatttatattttacagattcattatagaaatctttcccttatttagttgtttattcctacttatttgtaagtattgtaaagaaaattttttttcagaatgatttctattgggatatagaaatgctactaatttttgtatgttggttttctatcctgcattattacttaatttcaaatctctctttaaaatacattttataagaaagaaagaaataaaattcatagaaaaattttgtgactaacactgtcattattccaaaacttcaaaaccaagccaatataagatacatttggatgtaaaattacatataagtatatatatatgtatatacaatatgtacatatataataactgagaagattttatttcagaaatacagggcattccaagaagacaatcagcttatataatttaataaaataaaataaaacaacagcatttattgagtaaattattgtatacctttgtaacatttataaataacttaaagctgggcacagtggctcatgactataatcccagcactttgggaggccaaggcaggtggatcacctgaggtcaggagttaaaggccagcctggccaacatggtgaaatcccatctctactacaaatacaaaattagccgggcatggtggtgcacacctctaacccaagctacttgagaggctgaggcagtagaaatgcttgatcctgggaggcagaggttgcagtgagccgaaattgcttcattgcacttgagcctgggcaacaacagtgaaactccattgagtataaatggataataataataattaatgataatcacattattattataacttagaaaaatactctactagtgaacatttcaattattaatgataacaatgcatcagtatataagaataaaatataaatgaccaatgagcacatagatgcttagcatctcttttcattagaaaaatgcaaatcaaaaccacaattaaatgtcagtttacacgcactaggataggtatattcaagaaaagaaataaatgtggatgagaatgtggagaaattagaaccctcataccgtgctgatggcatggtaaaataatacagccattttggaaaatattttggcaggtcctccacaggttaagatagagttaccatatagctcagcaattctactcctgagtatataccaaacagaaataaaagcatatgcctacacaaaaactttgtattatgtttataggagcattgttataaatagccataaagtaggtatgacccaaatatctatgggtgaataaccaaataaagaaaatatggtattatctatacaatggaatattagccataaaaataaatacagtcctatgatatgtgttacaacatggataaataataaaaacatatgctaaatgagaaaaaaaacaaagaaaaaagttcacatatttctataaaatgactagaatagacaactaaagatagaaagtggattagtcgttaccagggaaattgggtgggagaataagaaatgactgcttgatggatatggagttcttttgtgaaagggtgatgaaactattttggaatttgatagtggtgacagttgtgtagcattgtaaatagactgaaaaacactgaattttacactttaaatcggttaatacattgaactctatgttatgtaaattttagctgactgaaacaatttaacaaacaaagaaaaatagactatgaaacaagagaacaactgagggagccctacaggctccaggacaatgtggggggcctcagaagccttctgtgcttcctgtttgcctccactattctgaggtatccagttaactccccaggcctcctcatcccagcctggaaaatgactttagctccactcaaaaaaacaaacaaacaaaccaaagctctgacagggatggtcttgtccttgggcctcggagcagtggtctgatgctctgccacattctacagtagcctgtgtgctcagtcccacaaacccccaggccactttctgctctgaaagaccttcagaggatacagagcaatttccaaggtcagctcacttctttaagcctttgaaatttaggggccacccaggtcaattatgtcagtttatagagaaaaaaaaataaggttttcactactgtattcctctccatactgggtatagggggattcttcctaattttaattatgcacagcaatgaatgcagaaaacaagtttttgtcctctgaaggctatcctggggatggccacagcccaggcaaatccatgggaaccttgaggttcccaagccattggcctgttatcttttcccacccccgtgttatgggtcttgggcatgttaccaggagatggggtgcccctaccttatggcaaagctgccccgatcctctctttcctttcttcttgtcactccatcagtattaactcatcttctgatctttaacctgagaagtctgtgtgtgtttttttgtgtgtgtgcgcacatgtgtgtttatgcccaaacctgtacgcgtctaatggtgcagacgtgagattgcatcatatgatgagaaaattggcaggaatccccaggatttcagggattcattcccaaagcaaaccccgtgagagagttgagccctggcctaggatgtcagaatgctcttttattctctggactctgcccactttatgttctctccatatcccagtttcttctctccatatcctggagagaagtctcggcttctctccagatcccagttttccaattatccagtgaggtgttagatgtcaaagcgcttaagccacaactcagcatgcacatggtccaagctgcctgccaactaggatggatgtagcagggctgtgatcagggtgtgcccagatcttccttactcgagcagaagtagatgggttctgcagtgggcagctggaccttctgtccaagaagggtcgtgcacacaggatctttaaaggcccacagacaatgggtgcatgtgagccccacctccatcccccaacagcttcccatggagcataccaatttttcccctgtcctctgcatctggaaggtggtgacatcctcactgaacacatagactgatggacccttcatggtggagtagtcccacgaagagaatctgggatgctattaactgtacaagggactatggatgtgggccatgtgaaaacactagaacttcagaattaaatcttcctcactgcagcctgtggggaaaagaaagagagatcagactgttactgtgtctatgtagaaagaagtagacataagagactccattttgttctgtactaagagaaattcttctgccttgagatgctgttaatctgtaaccctagccccaaccctgtgcttgcagagacatgtgctgtgttgactcaaggtttaatggatttagggctatgcaggatgtgctttgttaaaaaagtgcttgatgagttcatgtcctttgtatggacatgggtgaaactggaaaccatcattctcagcaaactatcacaaggacgaaaaaccaaacaccgcatgttctcattcataggtgggaattgaacaatgagaacacatggacacaggaaggggaacatcactcaccggggactgttgtggggtggggggagaggtgagggatagcattaggagatacacctaatgctaaatgatgagttaatgggcgcagcacaccaacatggcacatgtatacatatgtaacaaacctgcaccttgtgcacatgtaccctaaaacttaaagtatagtaataaaaaaaaagtgcttgaagccagtatgcttgttaaaagtcatcaccattctctaatcttaagtacccagggacacaatacactgcggaaggccacagggacctctgcctaggaaagccaggtattgtccaagttttctccccatgtgatagcatgagatatggcctcatgggaagggaaagacctgaccatcccccagcctgacacccgtaaagtgtctgtgctgaggaggattagtaaaagaggaagacctctttgcagttgagataagaggaaggcatctgtctcctgcttgtccctgggcaatggaatgtctcggtgtaaaacctgattgtatgttctatttcctgagataggagaaaaccagccttagggctggaggtgagacatgctagcggcagtactgctctttaatgcatcaagatgtttgtgtacgtgcacatcaaagcacagcacctttccttaaacacagagatctttgttcacatgttttcctgctgaccctctcctcactattaccctattgtcctgccacatgcccctctctgagatggtagagataatgaacaataaatactgtgggagctcagagaccagtgctggtgcaggtcctccttatgttgagcaccggtcccctgggcccacttttctttctctatactttgtctctgtctcttatttcttttctcagtctctcattccacctgacaagaaacacctacaggtgcggaagggcaggccaccccttcacagccttccaccactatacagataggagaatgtcttaggaaggagacatgtattatccaagattatacaaggattccatggcaaagctagcactttggttaggattacatttgcccacatatagaagaaaacccaatataatagtagtgcagaccagagagaaaatgctttctttctcataaataagaatcctagagctgggcagtgcatgttgactctgatctgtgcatcaaggcagtcaaaaataatctatctttttgctaatttttttctttttttaacttttattttaagtttaggggtacatgtgcaggatgtgcaagtttgttacatatgtaaatatgtgtcatgaaggttgattgtacagattattttatcacccagtcattaagcctactctccactagttattttttctgcttctctccctcctctcaccctccaactcctgataggccccagtgtgtgttgttcccttctctgtgtctgggtgttctcatcatctagctcccacttataagtgagaacatgtggtatctggctttctgttcctgtgttagtttactaaggaaaatggtctccagctccatccatccatgtccctacaaaggacatgatcctgttcctttttgtggctgcatagtactccatggtgtatgtgtaatacattttcttcatccagtctattattgacgaacatgtgggttgattcaatgtctttgctattgtgaatagggcagcaataaatgtgtgcatgcatatgtcttcataacagaatgacatattcctttgggtatatactcagtactaaggttgctgagtcaaagggtatttttttctttaggtctttgaagaatcaccacacagtcttccacaatggttgaactcatttacactccaatgaacagggtaaaaatgttccttttctccacaactttgccagcatctgctattttttgacagtttaataatagccattttattgatataaaatggtatctcattgttttttggatttgcatttctctaatgatcagtgatgttgaactttttttcatatgcttgttggctgcatgtatgtcttcttttaagaagtgtctcttcatgtcctttgcccacgtttcaataaggttgtttgatttttcttgtaaatttgagttccatatagatgctagaaattggatctttgtcagatgcatggtttgcaaaatttttctcccattctatacgttgtctgtttacactgttgatagtttattttgctgtgcagaacatcagtttattttgctgtgcagaacatctttagtttaattagatcccatttgtcaatgtttcctttgctccaattgctttcggcatcttcatcataaaatatttgcccgtgcctatgtcctgaatggtatttcctaggttgtcttccaaagtttttataattttgggttttacatttaacttgttaaactatcttgagttaatttctgtatacggtgttaggaaggagttcagtttatttctttctttcttttttaattttagtttaagttccgggatacaagtgcagaacatataggtttgttacataggtatacatgtgccatggtggtttgctgcacctatcagctcgtcatccaggcttcaagccccacatgcattagctatttgccctaatgctctccctcccctcaccccctactgtctgattagccccagtgtgtgttgtttccctcccagtgtccatgtgttcttattgttcaactcacacttatgagtgagaacatgccatgtttggttttctgttcttgtgttagtttgctgacaatgatggaggaaggggttcagtttcaattttctgcatatggctatccagttaacccagcatcatttactgaatagggagccctttttccattggttgtttttgtcaggtttgtcaaagatcagatagttgtaggtgcgcagtcttatttctgggttctctattctgtttcattggtctacatgtctgttcttgtaccagcaccatactgttttggttactgtagccccgtagcatagtttgaagttgggtagcatgatgtctccagctttgttcttttttgcttaggattgtcttgactattaaggctcttttttggtttcatataaattttaaaataaatttttctagctttgtgaaaaatgtcagtggtagtttaatgggaatagtattaaatctgtaagtttctttggggagcatggccattttaacaatattaatttttcctatccataagcatgaaatgtttttctatttgtttatgtcatccctgatttctttgagcagtagttcatagttctccttgtacagacttttcacttcccttgttagatgcattcctaggtgttttgttctttttgtggcaatagtgaatgggcgttcattcatgattttcctcttggattgaccattgttggtgtataagaattctagtgacttttctttggaaggccgaggcgtgcggatcatgaagtcaggagattgagaccatcctggctaacacggtgaaaccctgtctctactaaaattacaaaaaattagctgggcgtggtggtgggcacctgtagtcccagctagttgggaggctgaggcaggagaatggcgtggacctgggaggtggagcttgcagtgagccgagatcatgccactgcactccagcctgggcaacagagcgagactccttttcaaaaaaaaagaatgctagtgatttttgcatattgattttgtatcttgagactatgctaaagatgtttatcagcttaagaagctttgggggtgagacaatggagttttctggatataagatcatgtcatctgccatcaagtgtagtttaacttcctctgttttgatttgaatgccttttatttgtttctcttgccagtaaattccaatactatcttaaataggagtggtgagagagggcatccttgacttgtgctggttttaaagggaaatgctttcagcctttgctctttcagtatgatgttggttgtgggtttggcatatatggcttttactattttgaggtatgttttctcaatatctcatttattgggagttttaaacatgaatggatgttgaattttattgaaagctttttctgcatctattgagataatcatgtcgtttttgtctttagttctgtttatgtgatgaatcacatattgatttgtgtaggttgaaacaacattgcatcccacgaatacagcctacttgattgtggtggataagatttttgatgtgctgctggatttggattaccagtattttgttgagaatgtttgcatcagtgttcatcaagaatattggcctgaagtttcttcttttgtctgccatgttttggtaccagtatgatctggtctcatagaaagagttagggagaataccttctgtttcaattttttgaaatagttttagtagaaattgtaccagttcttctttgtatatcggggagcattcagctgttaatttttctggtcctgtgcttttaatggttggtatgctatttattgctgcctcaatttcagagcagttatttctcttttgagggattgaatttctttctggtttgtcttgggaggatgtatgtgttcagaaatttatccatttctactaagatttttagcttatgtgcatagagttgtttacaatattctttaatggttatttttatttctgtggagtcagtggtaatttattatttctgactgtgtttatttgaatttttgatctttttgaatttggctacagtaaccaaaacagcatagtactggtaccaaaacagagatatagaccaatggaacagaacagagccctcagaaataatgccacatatctacaactatctgatctttcacaaacctgacaaaaataagaaatggggaaaggattccctatttaataaatggtgcttggaaaactggctagccatatgtagaaagctgaaactggatcccttccttacaccttatacaaaaattaattcaagatggattaaagacttaaatgttagacctaaaatcataaaaaccctagaagaaaacccaggcaataccattcaggacataggcatgggcaaggacttcatgtctaaaacaccaaaagcaatggcaacaaaagccaaaattgacaaatatgatctaattaaactaaagagcttctgcacagcaaaagaaactaccatcagagtgaacaggcaacctacagaatgggaaaaaaattttgcaacctcctcatctgacaaagggctaatatccagaatctacaatgagctcaaacaaatttacaagaaaaaaaaaaaaaaaaccccatcaaaaagtggacgaaggatatgaacagacacttctcaaaagaagacatttatgcagccaaaacacacatgaaaaaatgctcatcatccctggccatcagacaaatgcaaatcaaaaccacaatgagataccatctcacaccagttagaatggcaatcattaaaaagtcaggaaacaacaggtgctggagaggatgtggagaaataggaacacttttacactgttggtgggactgtaaactagttcaaccattgtggaagtcagtgtggcgattcctcagggatctagaactagaaatatcatttgacccagccatcccattactgggtatatacccaaaggattataaatcatgctgctatgaagacacatgcacacatatgtttatagcggcactattcacaatagcaaagacttggaaccaacctaaatgtccaacaatagactggattaagaaaatgtggcacatacacacatggaatactatgcagccataaaaaatgatgagttcatgtcctttgtagggacatggatgaaactggaaaccatcattctcagcaaactatcgcaaggacaaaaaaccaaacaccgcatgttctcactcataggtgggaattgaacaatgagaacacatggacataggaaggggaacatcacacaccggggcctgttatgggatgggtgggtggggggagggatagcattaggagatatacctaacgctaaatgacgagttaatgggtgcagcacaccaacatggcacatgtatacatatgtaacaaacctgcatgttgtgcacgtgtaccctaaaacttaaagtataataataataatttttttttaaaaaaaaaagaatgttaaatattggccctcaatcttttttagcttgtagagttttcagtgagaggtctgctcttagtctgatgggcttcactttgtaggtgacctggcctttctctcttgctgcccttaatatttttttcattttaactttggagaatctgataattatatgttttgagcatgatcttttcatggagtatcctactggagttctctgcattttctgaattttaatgttgacctgtatagcaaggctggggatattctcatggacgatatcctgaaatattttttaaaaattggctccattctccccagctctcttaggtataccaatcagttataaatttggtctctttagataatcccatattgctcacaggttttgttcattccttttgattctcttttttctattcttgtctgcctgtcttatttcagaaagacagtcttcaagagctgagattctcccatgttcttggtctattctgatattaatatttgtgattgcattatgaaattactgtattgtgtttttcagctctatcaggttgcttagattcttctctatccaggctaatttgtttgtcagcttttgcaatgttatattgtaattttgagttttcttgcattgagttagaacatgctcctttagctcagtgaagttcatttttatccacattctggggtctacttctgttatttcagccatctcagcctcagccctattctgaacccttgttggagaagtaatgttgtcatttggaggagtgaaggcactctagctttttgagtttttagtattcttgtgctgatcctttctcacttttgtgtgcttatctacctttaatctttgaggttgctgacctttgaatgggatttttgtttgttttcctttcaactgtttggccatgttgtgtagggctgttgcagttctttgggcatctgccccagtctgtagtcatctaggatttttcagtatctggaggtatcattagtgaaggctgtgaaacaacaaatcagcccacccctttctctgggaggtccatctcaggggaggtgcagacctgttgctggcttgaacacacctgtaggaggtgactggagaccccttttgggaggtctcacctatccagggggaacaggattggggacccacttaaagaagcagtctagccccactttcatagagcagccatgctatgctggggtaccacttctgcccctcatcaggttgtgctctctaaagcctggaggctgaaaaagctaagttgctgaaacagcaaagttgatggcccacccctatctctaggaactctgtcccagaaagttttcaaacttctgttggccagagaacatcagtggaagtggctggaggccctggttgggaagtcccactcagagataaggggcatatcaggatcctacctaaagaagcagtctgatcacatcatggtagagccactgtgctgtgctgggggattgcttctgccccctgtatggtttggggtctcctaagcccacaggctggaatggctgagttgtccaaacagcaaatgtggtggcccacttctcccactggacactgcatccagggagaaagcaaaattctgtctgctggagaatatggaaggggctggctggaggcccgagtaggaggccccaccctgagatgagaaatgtgtcagggtcccacttaaacaagcagtctggccacattttggtagagccactgtgctgtgccagggcttcccttcatctgccatcagttttgcttggactctcctaaacccacaggctggaaaggctgagtcatccaaacagcaagtatggcagtctgcctctgtctccagaactttgtctcatcccaggtaggtaaaacactgttactgggggctggctggaattccaagccagtgggtcttatcgggtgaggcatcatggatgtggggcccacagactgatgttgttcatccctgtggtttaggcttcctttctgggatttttatggtggtcccacctcctgttttgtccgagttgcagtcacctttgctggagatcctggagccggagtgtgtaaagcttctgagattctatttgtctgagcagtttctctggcaagaccatgcagctctgtgtgtcagaccaaaggccctggtgaaatgggttcatgagaaaatctcctgacctgagggataaaaagatccatgggagaagtgtggtttcacagggtcacacattcactcaccacttccctggacagggtagattcccttcgctctgtgtcacttctaggtgggcagttgccatgccctgctcttctccattctgcatgggttgagttgtttccttcattattcccagtgcaaatacctgggtgtttcagctgaaggtgttgtatttactctcctcctttgttcctttccatgagagccacacaccatattacttctagtcagccatcctggcacccttttctgctacaatatttcagtagatggtttttatcctgtaggctgtctcatgggccaagatggctgtaggaccgtcagcctacaccagcaaccatgtgcatttcaaagatcaagaaggaggaaagatgcaaggtcaaagtggctcacacagctgtgtcagcctcatctgaacagtctccccaaagtcccgtcaatacttctggttacacccaattgtcttgaatgttttctagtcattattagcttcaataggggtcaggaactataaccattgtgtatggtaagttgctgtttgaataaaactgaatctctgtctttaagaatgaaagaaaaataaaaactatggcaataaccagtgctctttttctgcactaaattcaaagataacaaggagaaaatggagtttgtctcaggtgaagtggcacttattttccaagcaaagcctcttttggtgtttatttattttcagatcagatgggaaaaagtcttggttctgacaagcactctttttatgaccaaaggttagttaagcttaacttaactctcttcttgacttagtcaaccttggcttgttgccctgctcctggtctgagaagcttattttcagaaatgctgctaagattgcttagtaaaaatccacatattttttacatctactaaaatcctcattccccttccctgatatttaagtccttagcctgcctgtaaacagaattctgttacaaaaaaaaattcctcctcctttggtattttatcaaatttatttcagtaattttttatccactgatttatttgcttattgattataaatcctgagttgtctgtgttcagagttatgatcgatttctgaaccgtattacaatggccataacatctactgcaatagtgttaaagtctttcttccgaatttttaacaaatgtcataatttttttaatttgacagtttcccaacaggatgtttgagtataaaaccagttttcagttccttcccaaaaatgatgtcaaccactgtgtagttgtatctgcctgacccttgcgtgtctaaaaaagtatgttcttatttaaaggggtgagggtggaagattatagagctaacatttttctaaaatgctgagtcataattgaaaccatacaaataaaagaggtagaatgcttggattccaacatttttaaccctgaggatacttcaatgtccatgatccatattactgtgaagataatgcacaaaaaagaaaactgatgattaaaattgaacatgatacaacgtatcattgactaaaaactaacataagagaaaaatattctcaaaaacatttgggtatccacagtttgacccaggaaagttgactgggtagatataatggtccatatagaaaatttatagaagcagaatctgtaaattatgatgtgaaaaagtcagataatttttatttaaatatagtgatcatgataacaataattcagttgaattaaaaattagaacagattaacttgaatttgttatgttctataaaatataaataatggagttaaaatgtcatatatgagtttgctctggaaaacacattctcaaataaataaaatctgattttatttgattatttgactgattttatctgtttattaaacccataataaaattattttgtgtggttcaaattctctaacataacatagtatggtcaaaatgaaagggtaaaaattgcaagaccgacttaacatttgtcatcttaaatgtactataaggatgccttttaaattaattcagtgattaggtttttaagtgcatggtttaggttatactgaagtgtcaaataccatccccgtaatttgcagtagattaacagcatattttagcacacataacagtgttattgagtgaccaagttgaaaaagcacctcctttgcaagtggtaattcaggaactcagagttttttcattatttgccttcaccatccatgagtcttggttgccctttgtgctcagtccccttaaaataaagtactttaagaaatacatgtgggaagatttaatggactcaacttaatgtggttcacatctgtctcactccatcagcattatcaataactggtcacatttccacatctaaggcaaaggaggttaagaaatgtaattcatctgtgcctaacaaaaggaagaatagatttttatgaacgacaagagttttctgttacaatatgtcactcatatggatttactgtgtttctcaaatatttattgaacatctattatagccaagtaccgtgataagggctgaagggaggacagagagctgagacagcagagtcctagtatgagagaaactcacagtctaagaaaataagaaaatacatggtatgaagtgcctgctgtcataagaaagaaaagaataatgtgaaaaggctctgaaagtttagttaattattctactttgggaaacttcctgaagatgatagcaagtaagatccactctcaaagataagtaagatttagttgatagagaaagatggatgcagaaatggttgagcaatggcagggtgataggatgacagaggtggctaccataacatgggacagaaagctttattaacttggcagtagggtggggtagggttggaattatcccaaagtcaatccttactcaaagtgaatcttttcactctgatctcactcatgttggaatagttctacaagctcttgtgagactgtattgtacactgtgggagtgaagaacagagtgtgggtgactcctaccttcatagaatttaatatcccatttgtctcaatatagccagtgccaagagtcatttacatagaagtttcaaatgcttgagagagactggcctctgaactaaaaagagatctctgtctggacacaggtggaactgtaaaatgttcactctttgtccccagttcgttttcatagaattcttcatacctgtttctatgaggaatgaactggatgtgtttgaagacaagctgaagagctacgttacctctgtgaacaaagtggggatgctggctccattaaccctgcaggtgaaaaagctgatcaaccccaggtcatattttgtaaacatgtttaaggctaaattaaaatttgaacatgctctaagaattttttttcaatagcctgtttatttttaatgcctattggaaaaattgaaatgaatatttaatttcaaatttggacaaaataaaacaccaaacacttttttcattaagatgctaaagaaagtttatttatatcttttgaactttgtcttaaattcatttgtatcttaaaatggaagctttctttgaaaactacatattctagctcactgacattgaatggaaagctattaactattccccaatgaggaaggatcttctaaaatggggctaaaatacatgaaataaatggtttccaatagctcctgcagctttgccaagtccatgtcaaaaaattacatgtatgggtttatttcctgacttttaattctattccattaatgtgtttgtattgatcttggatcctacaactttgcagaatttgattattagtgttaacagttctattgttattaattaggattttaattttatgtataaaattataacatctatatatagaaataagcttttttcttttccaattggagtgtttctgtttttgtgttgcccaattattctggccagatttctattacaatgttgatcagaagtgaggaatgcaggtatccttgccttgttcccgattttagggggaaagcttttaatctttcatcactgcatataatggtagttttgagttttttatacgtgccttttattatgttgaggaagttttagtctatatctagtttactaagtgctcttatcataaaagagttttggattatgccaaattttttctctatcaattgacataatcatgttttttgtaaaattcattctattgagttggtatattgcactgattgattgcaatttttaaagaatttgagaaaaattgtagttacagcttttaatgtttaaaacaatttatcagtggagccatctggttccagacttttctttgttagtatgttagtatgtttttgataacttatgcggtcttttacttattacaaatggtattagagttattcagagaaatagaagcaatagaataaatatctacatctatactatatctttgtgtgtgtgttcatctatgtatatgtgttaatatatgagacagagccctttagagttgtcttggtggtgtctgggcaggggtccttcatcagccatctctgggctggtttggagaaccctctgttcttccactcacctcatttcaatgctggccctttttggcagcagcaagcttctggccttcaagagagtaaacatggttaccccactaacacctttttgccagtctcctgtgtggagctctgcaaagacagtaactggtagacagacctggaagcctcagagctattcctggccatcactgctgctcctcataccccactcaaccttctgctccccagattaggcatagacttacgtctacacagaacttcagccttggaaagcaccagacgacagctccagggctcagaacaatctttgcaccagcacttgcctccctactttgccagccatgaccaggtgtgtaaacatgatgagccaccaggattctaacctcccaacaatctcttcctgttcaggatgagccagccccacatgacattcccctacacaccatatttgacattaaatatttatccttttgtatttggcttattttacatagtataacatcttcaatgttcatccatgtagcattctttttttgagatggagtctctctttgtcacccaggctggagcgcacagcaatgcaatcctgactcgctgctgcctcaacttccccgggctcaggtgattctcctacctcagatgatcctccctgtggatgggactagagggacacaccatcaagtccagtaaatttttgtattttttgtagagctgggatttgctatgttgcacaagctggtctcaaactcctagactcaagagattctctcatctttgcctcccaaagtttggggattataagcataagccaccacactcatgagcagtgcactcattttaaggttaaataatattccattgtacgtatataccatattttctgtatctgtttatttcttagaagatatctgggtttgtttttacatttagtactataaatgatgcttctataaaaattggtgtgaaagtatcagtgcataagtgaataaaattttaaaacctgaacacatctctgcatgcagttcttagattgaataacagaggccagacacggtggctcacacctgtaatcccagaattttgggaggctgaggtgggcagatcgcttgagctcaggagtttgagaccagcctgggcaacatggaggaattccgtctctactataagtacaaaaatttgctgggcatggtggtacatgctgatagtcccagctattcgggagacggaggcacaagaattgcttaagccctggaggcagaggttgcagcttaagtccctacttttaattattttggagatacacctgtaatggagttgctggaacatacggtaattctatgtagaactttctgataaactgccaaactatttttcacagtcaataaaccattttatattctcaccagcaatacaccagggtttcacttcctccacatcctagctaatacttgttctttttcatttctgttgttttgttttttatatagtcaccctaatatgcgtaaagtgatatgtcattgtggttttgcatactaagaaggcaacctactttatcatgatggattatctttttgacgtgctgctggattcagtttgcaagtattttggtgagaggttttgcattaattttcatcaaggacattggcctaaagttttctattttcattgtgtctctgccagggtttggtgtcaagatgatgctggcctcatggaatgagttggggaggagactctcctcaatttttggggatagtttctgtaggaattgtaccagctcttctttatacatttggtagaatttggctgcaaatccataaggtccggggctttttttgattggcaagctacttattactgatgcaatttcagagcgtggtattggtctgttcatggaatcaatgtcttcctggctctgtcttgggagggcatgtgtgtccaggaatttatctatctcttctaagtttcctagtttgtgtgtatagaggtgttcacagtagtagtactgaccctacagaaataaaaacaaccatcagaaaccaataaagttttaacatcaattattttcatgtcttgaatccatttttatttaatttttgtacatggaatgtgataaagattcaattttacttttttgttgttttgagacagagtttcgcatcacccaagctggagtgcaatggtgtgatctcagctcgctgcaacttccacctcccaggttcaagcaattctcctgcttcagcctcccaagtagctgggattacaggcacctgccacaacacctggctaatttttgtatttttagtagagatggggtttcaccatgttggccaggctgatcttgaactcctgacctcaggtgatccacctgccttggcctcccaaagtgctgggattacaagcgtgagccaccacacccggccaactttactgttttaaatgtgggcttgttttccgagaatcacttgttgaacagagtgtctttctttacaaaatggtttaggcacccttgtcaaaaggcaaccaataatttatgcaaggttttttcttctgagttatctattctatttctttggtctctatccttgttcttataccaatatcaaactgttttaattacagtagctttgtgtgttctgaaatttaaaattgtgagcctttcactttggtcttttcaagattattttggccattcagagtaccctcaaattccatataaattttagaatgggctattccatttacgcagaaaaaagttggaaaaaataaaaagttgggattacatttgtacactactttgggtaatattgtcatcttaacattattaagtcttccagtccatgaacatggaattccttgacacttatttaagtctatttccgaaatattcccatcctgtagtcttcattgcacaggtttttacttcctttttaaatttatcgctaagtattatattattttaatgttgttgcaaacaattgttttcttaatttcctttcaaatagttccttgttggtatatggaaatgcagtttatatttccgtgtagtaaaaataattattttgtctttcaaatctagattagcgattcactcagaataaatatgctgtatacattggtagtcatttaactttttccaataagctaaccaatttcagcatgttctaaatatgtaaaaatgttaaattgtgttttattttcatttactctcagctgtcattcactcacccagaattacattacttcacacaaagaacttccattactgtaaagtccctggtaattgtatttcttcctgtatctttcaatctttagcaattccacaacacaaaacaaccaaagttagtctttatgtcaaaaatcttcaatggatatttttcatcagaggattccttagtgcaacatttaatggaacagatgcatgctgctgaaatataattctccaaaagtctcttagagtttgttgttttgttatttattacatcatatatctgtcctgttccagattatttttcaaagatttttgtacacaaatagcctggaaaaagagtagtagtttttctcttcaggtgaatgacagataaattactcaaccaatatgataaagacaatgtttgtctgtgaggcaaagattggacaggtttgcatgtgaactactttaaaaagattagggtttctttatcttgagattactcggctgtgacacaaatctttcccatgtgcaatgtccatctgagccttttgaaatcccttttaaaaatcgagtatagacagggagaactaatacaaatatgaagcttttgccttcagttatgcagaaaataagtaaatatttttgtcatacttaagtgtctcatgccttttaccagcatccatgaaactagaaggtttataggttggtttacaaattaggtagaatctacgattcttcacaattatttagttttggtgatgaaaatatgatgctgagataaacacaactttctaaaagggggagagaaacaaatacttgaagagttttcaagggaatatgagaagtctccccaggtccaacagcaaattctctgagccaagtggttagtgaggtgaaacaagagctctacactctgctgtctgctaaagaggctgatgtgtgggaggattaaaactaggagcctgagtgctttgcatgttcatgtttctcctgctagaaggatcaagcagtctttaaagctgatgttgaggcttggttgagtccaaaacactagaagtttatgcggttgagctatgagcagtctaaaggctgctaaaagctaaattaaatgggtcttgttagtgcctttttttttttgagacggagtttcatgcttttcacccaggctggagagcaatggtgcaatctcagctcactgcaacttctgcctgccaggttcaagtgattcttctgcctcagcctccttagagctgggattacaggcacctgccaccacacccagctaatttttgtatttttagtagagtctgggtttcaccatgttgtccaggctggtctcgaactcctgaccttgggtgatccacccgccttggcctcccaaagtgctgggattacaggcctgaaccaccacgcccagccgttagtcccttctttacccagatgaaggttctcactccctctgcactcctaaattttttccttcatctatagccaacttaagcaactttaaatattaaactacataggattggagatttggagggggaaactcaagcttttgtagttccgttagatacaggtatccaatttaccattctgtgtagtctcctagggtgcacagggagatataggtacaagggtgggtggaagtgctgacaagtgtagggtcaagaatgattacaaagtggtagaaagtaaaaagttcttaatcctgggtactcttaaaatgtaaggcatcacagaccttagtatagcaaaccaagagagaaaaaaatctaccaaccacccaatccctctgcatgctaatcacttctggccccttgcgccctcatgctcctgcccaggggatagtgctatcctactttagcccttgcctcaaacaaatattaaacactacggtctgtgcttacatagaaaaagctgagcagagggaaaaataagttggattaattccacacatgcttcatgactctcataaattacaaactgtagggtggacatattaacaatcagagttctgtaaacatagattttattttattttattttattttattttattttatttatcttattttattttattttattttattttattttattttattttattttattttatgtttgagagagggtctcactttcacccaggttgaagtgcagtggtgtaatctcagctcaatgcaaacttcatctcctgggctcaagtgatcctcccaaatagctgtaactatggatgtgcaccatcacacgcgggtaatttttttactttttgtagagatgtggttttgccatgtagcccaagctagtctcgaactcctgagctcaactgagccattcacctcagcctccaaaagtgctaggattacaggagtgagccatcacacctggcagagttctgtaagtatagattttaatgagcattatgtggcaatagatgttcttagatttatagacgtaaatatttaattgatattaagtacaaccccaaggctctttttttaaagttctctgattactactgtgagttaggcaagtcaagtcagatccttctgctttgactgatgataaaaataggcagagagtgtgagtcaccaggcagtggggagcagagaaaaaagtttggactgtacttcattgatctatttcttctctgattggcacttttctgtctctccacaaagttcaacaacttgtgatttttcatagtttgtgtctgaagtgtccagaaatgttaataggttccagctgagctttgcctttggaataatttactatctgttgtctacagaagaaaatatatgcagctatttaaggacatattatgtgccaagcactgtgttaagcagtagcttacaggtgcgagttgacttaatctttagggacactcaaggatcaatggactcattattccaattttacatagaaggataaaatgttgtctcattgtgagtggctgcttagaaagaataaatgaataaccaaagctacatggctggtaagtggtaaactggaatctcaaaaaccaatcatttaatcctatccttttggcaagctgagcagccccttgccagtggtctaaaacaatgccaggaaaagagggggtgacaattgtgcatttgataaacaggtaaaagcctggtgttgatattcagaaaaaaaactattcaattattgtaacacttgacatccatttttaacttaatgcagcgcataaaagtgtttacaaaagttgcacatgcttttgagatcaacatttgggagggatttacatagaatatacatttaccttaaaaaacatgcttagccactggtaactctatgtctatcaaattaggtgtttcaactaagaatgagattgctaattatgtttttaatatattttaaataagttcagtcattactattcagtgatcactaataacaggttggatacatcttagaccagatagcacatgtgtgagtgtgagtgtgtgtgcaatgcatattttgcctacgtttctgtatataatatatatttatctatatattatacataatatatataatatatagcatatgtaaagataatacacagatatatattacatgacgaaaacatgtattctctttgtattagtgtttaatttactagtgtccagaagaaggaaagaatacatttcacaagtaaaatcaaagcactacttttttttttttttttttttttttgagacagagtctcgctttgtcgcccaggctggagtgcagtggcccgatctcggctcactgcaaccttcccctcccaggttcaagcaattctcctgcctcagcctcccgagtagctgtgactacaggtgcctgccaccacgcccagctaatttttttgtatttttagtagagtaattaagtaaaattaacaagaacataattttttttgtatatttttgtatatttcgctattgtttttcccatcaggttttaatctttatttacaaactcttaccagctggtcctggtggctcatgcctgtaatcccaaaactttgggaccccaaggcaggtggatcacctgaggtcaggagttcgagaccagcctggacaacatggtgaaaccctgtctctactaaaaatgcaaaaaattagtcaggtattgtgtcaggtgcctgtaatcccagtgactctggaggctgaggcaggagaatcacttgaacacggaaggtggaagtttcagtgagctgagattgcaccattccactccagcctgggcaacaaagagtgaaactccatctcaaaaaaaaaaaaaaaaaagaaagaaaaagaaaaagaaaaaaataaaataaaaactcttgtctttttaaagatctattctagactctccacccaaactcaattaccaaaactctaggtttctgaggtgtttgattttcgttcctgactcctgaatagcacctctgaacctacctagggcctggagagccttgccaaactgaagggggaaatacaggcctggctgcctttttcacctgctgattgtagagccacagcgtcttgagtgaacatagggagtaaccaggaagctgtaacagcaggccttgggtaagaccaagcactctgctggattcaggtctgacctaatgcagtcatagttgtgatggccacagagatgcactttcatgtgtctcagaacacacacacacacacacacacacacacacacacagagaaactccatttgtttgggagaaagtaagggaagaaaagaagagtctctgcctggtaattcagaaaattctcctggatcttgttcaagacaatcttgttcaaagccatcaaggtagtacctctgtgagtctgcaagaaccacattgttaccgggcttgaggagtcccctaaagtagaaaaatcttagatcacaacacccaagtcctttcaaatatctctgaagccttcccaagaacaatgactacaaacaatcccagggagtgttgactataacaaatatcaaaatcttcaatggtgagacacccacaaagatctactggcatcaacaaatgatttaaaataatacttaaccaaatgaactaaaaaaggaaccagggacgaatcctgcagaaacagaaatatgtgattttcctgatagaaaattcaaaatggctgtgtcaaggaaacaaagaaattcaagataacaaagagaaggaattcagaattctctcagatatatttaacatgcagaaaaaaataattttaaaaagagtcaaggagaaattttggagatacaaatgcaatgcaataactgaagaatgcatcagagtcttttaatagtagaattgatcaagcagaaaaaagaattagtgagcctcaagacaggctatttgaaaatacagagtcagaggagacaaaagaaaaaagaataaacaactcacagtgtagatctcagtccaaggctgaggacatgagaacctggaatttcacttgtgtaggtcctggagtcaaaaggcctggagtcctggagttctgatatataaggataggaaaagaagagtgtgcccgaatagggagggagggagagagagaaagagaaagagagagagagagagcaattcttctatattgtcttttcaatttttttttaattttatttttgagatggagtttcactcttgttgcccaggctggagtacagtggtgtgatctcggctcactgcaacctcctctccccgggttcaagttattctcctgcttcgaccttccaattagcaagtattacaggtgcctgccaccatgcccggtaaattttttgtatttttaatagagatggggttacaacacgttggccaggctggtctcgaactcctgacctcaggtgatccacccacctcggcctcccaaagtgctggtattacaggtattagccaccacacccagcctttcttccttttttgtcttggctctttactaattgtatgatttctgcccacattaagaatgagtctttcccacttagtccactgaaactcacatgctaatatcttctgtaaacaccttcagagacacaaaaaataatactttaactgtcctccaggtgtttttcttttcagacagggtcttgatctgtcacccaggctggagtgcagtggtgtaatcattgcttactacagccttgactccctgtgctcaagcaattctcccacttcagcctcctgagtacctgagataacaggtactggccatgatgctcagctcatcctttttcttttatgttttgtagagacagaatcttatcttgctgttcttgagctcctaggctcaagcaactgctcctcaggctcccaaatgctgaggttacaggcatgaaccaccatgtatgcctggcagtctccaggtattccttaatttacttaagttgacaactaaaattaattattataagtccaccactcatcaccttgacacttatacatatgcccttatatcatacctaatttccaaatgacgacaaaaacaaggtaatagttttaacaaatataaagcatctattccaagaacaacgaaaagtgcaacagtatcttttccagaagatgaggtaaagctcttggaccatgttaaatttttcctgattaaagactatgatataaaattaacaatatttaaatactgacataaacataataaacattgtattacataacaaagaataataaaagagcaaaaacaacaacatttgcttaatatatgtctatagaaacatgaacatagtcttaactatataggaagaccatccacatggcagttatagtcctcatttctatcactggtcatttggttgtagcttgtatttgtaacagctttcttctgtccactccatattacatttaacaagcacctaagctggttatggttctttactcagagttgtgacccaaattttattcctaatgtttcttggctgtttttagtttttcctggattgggttcttgtaatttcccattgaccttaattacagttcattctaatactatgtatttcagacatacttttcattattccattgtggattagtattctaacttttcccttggtattccagatttatcaccccaggtaacactataactcccttctaagtctgttgactgagaggcatgagaaacacaaagtggcacagtggcattcttaactttcagttcaatttaataacttttaaaatcttttgttggaagcagtacttcctctggaactgagacctctaggccacctctaggcccagtcatgggagcagagccaaaaatatttctagaaggtcatgaggggaaataatgagtgatataactcccattttcacctcttcatttttggactcataaatcctgactatgggaaaatggtaccataggttggacgctgatgcagagcatatatcaccttctgaagaacctggcttcattgttaagaagtattgtcacctacttggtgccataaccaacatttcaaaaggtcatttatcattccactaagccagttgcttcaggataatggaaagcatggtaagtctactgaattctataaagatgagcacattactacactttggctgtgaagtgagtttcttggtctgagcaatgctgagtggaataccatgagaatgcataagggattccgtgagtccatagatggtagttttggcagaagaattccctgaaggtaaaacaaatttatatccatggcaagagcctactccaatgagtataaactgttgccccttatattatgaaagttattcaatgtaataaacctactaccagctacctggcgaatcaccctagaaatggtgtcatatcaaggactcagtgttgttatgtgctgctgtcagatttaacactcagaactggctgtagccagactggcctttgggattcaaagttgatgctgcttatcccatgcattgcttctatttctgctactatgttcactttgttcataagcccactgggtgatgaagagggtggcagggaaataagaataactgatacccacagaacaagtcattctgtccatgtcattatcaaaatcctgctctgatgtggtcatcccttggtgggcattcacatggaacatacatatctttatgtaacttacccagtgagaggggtttatccacaaaattctttccaattttttttgtcatgaattgtgtaatcatgttccctacatgtcgctgaccatctagccaattcatgggccacagcagtgttgcaggattggggatcataagatctcaaactcctggtctcaagcaaaccctgcctcagcctcttaagtagctgagactataggcgcacaccacaacgcccagctaattttgttgtatttttggtagagatggaattttgctgtgttttccatgatggtctcaaactccttgcctcaagcaactctcccagcttggcctgcaaagtgctggaattacaggcataaaccatcacactcagcacctataatttgatattttaaacaatactatctagtgaaacctataacaaagtcatgtagggaaagaaagctcactaacacagtgtaaaattgtatggatatgatgcatgcacatgtgtgcatacatgcttgtgtgtgtgcgtgggtgtgtgttttccgagaaatggtactttattgctacaaggctaggatagcattcatgttcatctggtgatgtcaaatattgaaattccaggattcacataacaagattcctaactcattcacaacacggtgaacactgtgaaacacaattgagaaatgggcactttggaagaaacaactggcctagggacaagagacagtgtgcaagccatctgctccatgaaatgctttgttcagagcatgcatttcatgcacttcattccatggtgacagatattgctactctgaggtcgtgagacattgaacctaggatttgctgtgaaactctatagactgaacatctgtctgcagtatctcctgcctctacccataacctgtgccacacaccagtggcgcactcttctctctggataaatgaaagttctggatgatccgatgtgcagagaattaggctgtttttcccaggggctctagttgaatttttttgggactgtctgggaggatgccctccacgttgtccaaggggaatcacgagaaaaccggtgaccccatgtgcctccattccctcccccttcctcccctacccctccatcagggatcgcatttattccagaatgatacttgctttcattgtcattgggagtcacctagcagcgaccgttattgaaaatttaagcagcatagaacagaaaaagctctagtcacctgtgcacagcttactgcaatggtgaacttctgggcttaagcagtcctcttgtctcagcttcctgagtagctgagactataggcctgtgccacaatgatcagcaattttttcaagtagtgataaactctctctcttccaggttgctctggaactcctggcctctagccatcttcccaccttggtctccagaagtgctagaattacaggcatgagacactatgcccagtcctataatttgatattttcaacaatactatctaatgaaactcattacaaacacatttggcaaaaggaagctcactatcatgatataaacttgtagacatatggtgcgctcccacgagcgtatgtgcctgcatgtgtgtctgttttctgagaaatggtactcttttccccaggggctgtggttgaagagttgtggggactgtctgggagggtgccctgggctcagaaatgtaatccaagagagatcagaagaccggcgaccccatatgcctccatccccttccccttccacgcccacccctcaacaagggatcccactcattccaggctgacccttcatttggttgtcatctggtgtcacctagaggtcactgttattgaaaacataggcatcccatcaaaactcctggctgcctgcacacagccagggaaaactgtggtttcccttgggccccacgctgacctcggtggcactcccgccctccctccacccactgccttgttgcctaaggaacctccaccctggctaggccccattgttcttttatcatttgtgtttctttttccttttttttttttttttaacaagcatagactcttcttccttggttttaaaaatggtgtgaaaggaaaataaatcttggggcttccaaatcactagctaaagggaaaagtcaagctgggaactgctttgggccaacctgcctctcattctgtacaaagtcacccctctgggcgcattggctcaaacctgtaatcctagcactttgggaggctgagggggtgtggagcacctgaggtctggagttcaagatcagcctggctaacatggtgaaactccatttctactaaaaatacaaaaattagccaggcatggtggtgcattcctgtaattccagctacccaggaagctgaggcaggagaatttctggaacccaggaggtggaggctgcagtgtgcagagatcgcatcactgcactccagcctgggcgacagagcaagactccatctcaaaaaaaaaaaagtctcccctctgctcacagagatacatgcatatctgattacctcttttgtaaaggctaacagaaactcaaaagaatgcaaccatttgtctcctatttcctatgacctcaatgccccctccccactttgagtcttcccacctatgcttcaagttttcccgcctttgggtcgagttttcccaccattccagattgaaccaatgttcatcttgcatatgttgattgatgtctcatgtctccctagaatgtataaaaccaaactgtgctgtgaccaccttagccacatgtcgttagagtaccttgaggctgtgtcacgggtgtgcatcctcaaccttggccaaataaacatttttttttttctgagatagtttcactcttgttgcccagactagagtacaatggtgccatcttggctcactgcaacctccccctcccaggttcaagcgattctgctgcctcagcctcctgagtagctgggataacaggcacccaccactacgcccagctatatttttgtatttttagtagagatgggatttcaccatgcctatatttttgtatttttagtagagatgggatttcaccatgctggccaggctggtcttgaactcctgacctcaggcaatccgcccaccttggtgtcacaaagtgctgggacgacaggtgtgagtcaccgcgcctagcttaaattgcgatttttaaaaataaatgagtttccaggaaaaaaaaatgaaaaaaacccacagtgaaacatatgcctctcgacttttgaggcagcaacgacactataaaattatatgtcgttccttaactcagctcatttcttgactggggaccataggcatttgggccacttcctcatggaacttacttgtgcttcagggtctgttcagacctgatcaggtccacacagcttctgtgttatgctgaagtgctgttgtgcacacccatttacagccagtttgtgatgagcagctcggttcacatggtaacttcatggccccacggttgggcattttgtttctactagcagccagagaggttagctgagacagaatcttctcttttgccgatggcagcatgggaatgaaggatgtgataggcatatttggaatttgtataaatgttgacttgtttacctttgggaagggttagggctctggtgagagctataagttctgctttttgggaggaggttcctggaggtaagggcctggctttaattacttggtcaagagaaacaactgcatatccagcaattttgggggagccagtgggcctggaagaggagccatctatgaacagctggtcactggggttggtgagagtcttggaggaaatgtttgggaagtgtggctgcaggtggtcttggatgtcagtgcaagaataagtaggaagggaagaggatacaagaagtaaggatgctgggttgaggggagcacttttggcaaggcagaatttgggatttttgataaagaggccatggagtaattgaatctgggaaggaggaagagagcttaatgcttgggaggagaggagatcttgtagactatgaggactgtagaccgtggtattttggctgatgttagtttcttgctttctagagctaaaactgtggctgctgccagtgctctaagacaggttggccaccctttgactgagttgctgagttgtttagagaggtaggctacaggagcaaaggaagagggattttgtttttgttgtcctgagacaccaagggctattccttggtttttggcagtatagagagtgaaaggttgggatatactaggtaaggacagagctggtgcagtgataagattggtttagagtttgtggaagttggggagtatgttatgtgaggagtttaggtgtttgttgaggggtctttggctgctttacaaagggggcaagctaggagggcaaagttgggaatccatatttttagaaagcctgttatccctaggaaagaaaggattttgcttttttaggaaggtagagataggctgactattaaggctgctgatgccagggtcatggcttgggacctgggggagagttgaagtcctaagcaggtcaccataggggtggaaagcagtgctttggagggggagaccctatggcctttattagtaaggaaattgagaagggtggcagcatgagtttgggagatttttaaggaggggctacagaggaggaggtcatctacatattgaagaaggcagctggaggaaagatttaaggaggtgaagtcttgggctagggcttgcccaaagaaatgagggctatccctgaagacttgagggaggacagtccatgtgagttgttgtgactggagagtgttggggtcagtctgggtgaaagcaaagaggttttgggaatcagggtgtaggggaatggtgaagaaggcatctttcaggtcaattgttgtatagtgggtggtgttggaggggacaagagagaaaagtgtatagaagttagggactacaggatgaatagggaggacagcctgattgatagctcggtggtcctggatgagtggtatgagccatcagatgttttaatagggaggatgggggtgttatacggagagtgtgttggtctaagaagactgcatgagcagagcttgtttatgatgggttgtaagcccttttggtatgttagggaaatggggaattggggaacattgggaaatttagagggttgttttaactggattttgatggggtcctagtgagcagctatggaaggggtggtggtgtccacactactggattaatgagggaggcggctagcgggtgctggggaggagggatcagaggctggactagcagagaggagcaggagagactctggttgagggggacagaaaaagttgatagaagccttgaatttggctaaaatgtctcggcctaggatgggggtggggcaatgaggcatgataaggaaggagtgtgaaaaaacagtattaaatagggaacaagtaagggattcagtagtgcatggacatgagaagagtacatcaacccccacaacagagacctgggaagggtaaatgggtcctaaaaatacaagtaaagccgattaggtggctccactgttgattaaaaaagagatcggtttacctgctattagcagagttaccctgggctccaatgcagtgacggcagatggggccgggggccctgggctctgtcagtctccagcagccaggccaaggaggtgtgggagtgtgagtgactcttcactctttgatttgccagggctttgaggaaccggcctgttagtctacttgttaagaggacaatcagacttccattgactggtttgttggcaggctgggcaaggagtttttggtattcgtgggttagggcatgttcaggcctaatggccttctttgccacacttaaaacagggcccaggagggtcactgctattgggtcttttgagcctctgggcagcctgggtagatagctgctgctaggagctggtatttagcctgatcttgttgggctttatttaatttattttgcccatctctgttgttgaaaaccttgaaggccaggataagaaggtcttgtagagggttttgatggccatcttctacctttttgagcttgcgctgtatgtcaggagcagactgagagatgaaatgggtattaagaacaatagttccttcctgggaggtggggtcaacactggtgtatttttggagggcctctgtaaagcgggaaagaaatttggcaagattttcattggccctttgggagatttttttttttgagttttttaaagtttacggccttgtgggcagcttcgttaaggcctgcaataaggaagtgatcatgtggttatgagatgccagccgggctctgtgggttggtactcccaggaggatttttcccggggaaatgcagcagcctttatgggcttaggagggtcttgccaatgaagatcgtcagcatgtgcctgagctgcaagctgcactcttttctttgtttttctgggaggaaagtagaagaaaggataatatagagatcatgccaagtgggtttataagattgagtgaggtatttgaactttttgatgtaagtgtcaggattggaggaaaaggacctgagaccgttcttaatttgggaaaggttggagagggagaagggaatgtggatgtgaacgaatcctttagcctcagccacctctcggaggggaagtaagggggccgactgttgggcatgctgagtccgagagcaggtatgaagtggagatggggagcaatcagaatcagaagttgggtggttaggagagaggaggggaaagaggtaaggcaggagcgggagcatatggtggaggattgtgatgatttgggggaggattatggtgttgtcagagagaaggaaagttggcagggtcaaagaaggaggaattgtcactaggagtggtggaggggggtgtttgaggatgggtcgggtttggagcaggcgaggaggatttggaaagtagagcaggactgacagagggagggacggctacagagggcaaaaaaaagcctgaacataagggatctctgaccactttccattgcgatggcagaagttgtctaggtccctgagaatgttgaaattgaaagtgccattttcaggccattgggagccattgtctagtttatattttggccagggagtgttacaataaaagatgaggtttttttggccaaattttggaatggaggataagggcattaatgttacagaggagatacccaaggggcgggggggggatgtctttgagggagtggattgggaggctcccttagtgaaatgagaaagggaggggtagagacaggagacttggctagaatggtgggagaaggcatcccttgtcccacggttcaagtcggagaagtgcgataatcctccgttcaggcatccccgaaagggagataccaagggcctagaggccgggaggaggaaacccttggcccagtgctaggtctttcaggaaggaaagagtagacaagggttccagaccgaaggcaaaagtctcctttactcacccctgaggtggtcctggtgtcggatgtgttcaccaagcgatggaaaggctgtatgagatccttgggtctctagcaggttctggaaggggtagttcggccgggggaagaatggagggaaggagaaagggagaaagggaggccaaactctaccaccttcctgagtttcagcaccagaaatgtaaggtcagctgagagaaaggatgaggagacccaaagtcagacaagcaagctttattgagctgcttggctgctccatcacagttagaggaggcagccccacttacagactatagcagggttttacagggccagaaccaggtcagggtcggggagctgagtcggggcaggagaactgggtcccagtagaggagctgagttggggatgcaggtgtctcaactgcatcctggagatgttttttgccagctttgttatgcgaggttaagagatatgttaaccgcatcctataactgtctggacaaacagatactggagggctcagtgaaggcaggggtttgtcttttgccctggggtagctgtgtggagagcacaagggagtgtattgtgaggcctgtgggaggggaagggtctggtcggggtgaccctaacagggagttttttcagacccccaattaaacttatttaatcttaaatggtcctgttaagaattccctcatcatcttgtcatgctccaaggcaggcccaggaaagtcctagtgaaaactcttggtggacttttgcgacattccaccctttgcaagagtgcactggttctctcagcttttaatatttaacttagccacttggtcagtactgaaacggttgttgcagaggcccgccttagttagtgagacctggcctgccacacacacaatggggcaatctcggcttgctgcaacttctgcatcctgggctcaagtgattctcctgactgggcccctccagtagctggaactacaggtgcccgccactgcccccagctggagctacactaactaatgtataggaatagattgaaatagagatttctccacaacagtgctggatgaacacctcaaggggatcacacaacctcttccgggacgtggtgaccattgtttctgtccgtgttcaactgagttcaaatttgatatttaagttttcctccacattcggcctcaatttgatactcaattgtaggaaaatacccttacagatacatggggaaggcacagttgatatagattacagatacagggtaagcacaggagaattaaaatcacaattaataaaaaccacacccactatggccaatgccaatgccagttggatagccagtccttgatggggtcctactggttagattccaactgttttacctgtttttgcatgtcttgggcaagaagagtaatactgtgagaattgtcagggatatacacacaacattcagtatgcagtaaggagcaaaactctccttgggctgcagtaagcatatctaatgtcattcgattttgcaacacaacagtatgcagctcagcaaattcatcgataacaacataaatccagtgctactctcaagagctttttctacatggaaacttaatattttaatttgttgctgaagcaggattgtaccagcggcaggggagaatactgtgatagggtaccaccaccagggagtctggcgcattcacaaccagcaatgtttgtaagcatctcaattactggggaggggaatatcatcccagatggtgaatggaattaatggccacccccaatgcatcttcctgcccagtgtgggggcaggtatcaccatctgtaggatctgcatacccagagggccctccagggaacagcaatggttttactataattatagtgtattaaggtgttattaaagtaggaaagagattgtgtttcattaggagcagtgtcactgatttggagtatgtgttgacaattgtctggaaggagaaatgccagagtgccattggaggagccattcaaggcctccaaacaaagcggaggctatatggagtccagccaccaacatggcaggctctaggtatatgccattccaggtatattgggcagaataccaaggcttctgacataaggcaagggtggagttaatcttttgtccaacttgagcaaagacagaatgcttggtttggccaaaaaaagtctgggttcgattgcaagtgttgttgttgtggcctcattggtgccgacatagcattcagaaacatcggcagggatgattctccaaggtagtccatttcctgtggcctctggcaattagacacatagccagcattgactgcggttggcttctgttgcagtggtggctacccagttgatgaactcattcttggctcagacatgataacccaggtactgattactagcaaacaggttatcctctttaataagaaaaatggaggggcacattatattgtttttcctctttaggaaattgtactatgccttcattttctgctcccatagctacaaggttaccagacatagggacgggatctgatggacactgtacccatattttggctccaggatttaagctacttgtaccagtggatccgaatcccccagttccataagtagcctcttttggggcagagatttcctcaggggttaattgttgacaaggtgtcactaacaattgagaaacccgcatctgcagttttatagcaaaagaatctggagtggtattgtataaaatgaccttcaactctccccagtaatcactgtcagttatgcccccatgtaccgtaagaccccacattgcaagacctgatcaggatgtaacccatctgcagtgtttgcgaggtattataactcctaggcctgaggccaccatgtatgtactttgggcaggaattatcccagacttgaaactatgtaagtccaagccagtagcttctattgtactctttcatgggagtatagcctccgggtggattttctagaattttagcgagagaggttggactacactggcacacttagcaatttgtaggtgtggggtaagcatttggctcactggggtttcagatgttgttaatcgccaattgtttaaattttgtaatgtgtcaaacaggtgatccttccatttttctaacttaccttgccctaacactttcaactgtttgttcaataactcattcattctttcagttaaaccagctgcttgcaggtggtaaggaatatgggaaaatccattcaatgccatcttgggctgcaaaggtttgtacagcttcacctttgaaatgggagccattgtctgtttgaatttgtatgggcacaccatcatatagaattaggatatttcatgttttaatagtgttaatttggttagcattagcataagcacaggctactaggagccctaagtaggtgtctacagcagtacatatatattggcaccctttagaaagtggcaagggacaaatatagtccatttgacaaatttgtcctggcatttttccccggtgaatgtgccccatagccctttgaggaattggcttggtttttaactgttggcatgtagtgcattgggataaaattgtctgaactgcatcctggggtaacatccttctttacactccccaagccatggttccctgtacgcctaggtgtccgcactggtgatgcacccattgtgtgattgcagcccaatctacttcttccaggtctgagtcggcagtaatagtagaaattttagcttgttggtctgcctgctgattagtctgtcaagagaaagcaaaaaggcatgaacatcaacatggaaaacagtgataatggtagtgtgcaccagaatccagatatctacccagtattgttttcccctggggtttagggggtggagtggggctagaaagtcagtcccctacctttgctagctcagcaacgacatctgccgccccccggaccccttgcttaccctaacagatcccccatctccaccgccttggaggttgacctcttactttgctttctgtttttcttcctttcttgggcttgagcagggggtgcaggggcgagggtgtgtgtggggaaggggtgtggggtgaggagggaggggagtgtcctaagaatcaatttagtgtcatgcctctttcatcaccaccaccactgaagatgaaaccaacaataaactaaataactgcattctcatctatagccttccacctgcttgggcggtccgaactggagttgtgatttttttcccccttcgctcctgaggcctccctctgtaggaaagtttcaccctggctgggtctcaaccagtggacttcgtggtttgggtgaatgagggcagcacccctgcttggtgtccagccactctggttcccgcctcctcctcctacaccatggagggctcatcctcgggctgggatggggttctgggagcatgttggggacagctgaggcagtcctttaccaggggtggccgcgtgggcccaggggcggggtggggggggctttctgagttccagatctcctctgcactgcggcagggtgtgggcacactgggacttgggccactcttgtgcacccttcctccactttctgttgcccaggtctaccagggtgggggaagggagcgatggggaggtcccgtatgacttctggtcccaagtgtcccactaccctccaccctcagcatccggcctgctggccgctcctctgtcaggtctccgggtcaactagatgtcggccacgaacgccagacttagcctccggctcgccatgtttgaggtcgaccagcaggccctctcaccggagtgagctgtaaggagggatgctcagtgaaccaatcaagacgtgggccacggaggtcagcagggctctgggcaattcatggtcctgacctggcaagcaccactctgggacctgagcgttgcaaacccatctacacccgtccaacctgtgttggccggcgctcctcgctcgctcaggcctccgggttgacaagagttcagccgtgagcgcctggtttagccgccagcttacagtgtcggaggtcaaacagcaagccctcccccggagtaagcagtgagaagggaagcccggcggaccgagtgcaacacgggctgcagcggggagctgggttcgggacgggtcagagtcctgaccatgctggtatggctccaggccctgagcatcccacacccagccaccatcgatggactggccattcctcagtcactgaggcctccgggtcaaccagatgccagccacgcctgacttagccgctggcttgctgtgtccgaggtcgaccagcaggtcttctcatcagagcactggggagggaagcccactggaccaagtgagatgccctttgaggggtgagccaggctcaggatgggtcagggtcttgaaagtcctggccccgagtgtcccacacccggccaccttcacccaccagctgctcctcactccctcgggcctctgggtcatcacgatgttgactgccagcaccgtacatggccactggctcaccttgtctgaggtcgaccagcaggccctttcacaggagctgcagtggggagggaagcttgctctggaccctgtgtggaacagctgtcagccgcgggtgccatacttagccactggcccgtgtctgaggtcattttaagggcgagactcctggtctaactcaggtattgtaaggggagagacacctggccaacctcaggcattctaatgggaaagatgcctggaccaccacagccattataaggggagggtttcctagatgaactcaggcattctgaagtgagagtctcctggctgacctcaggcattgagtggtgagatacctggactacctcagaaattctaaggggagagtctcctggttgacgtcaggcattctaacagtagagactactggctgacctcaggcattctgtggggagcgactcctggccaacctcaagcattctaagaggatagtcttctggccgacctcaagcattccaatgggagagacaccaggccagcctcaggtattctaaaaggagtgattctgggtcaacctcaggcattctgagaagagggtctactggccaatctcaggcattctatgtggagagaaacatggctgaccttaggaattataaggggagagaaatctggccaacattaagaattctagtggaagaaacgcctgaccaatcttaggcattttaattggagagacatctgtacgaacttattcattctaaaaagagagacccctggctgaccacattctttctcatgaaacacctggccgacctcagacattctatggggagagtctcatggccgaccacatgcattctaataaagtagacacgtggaccacttcaagaattccactggggacacactgttccaagatggatgaataggaagagctccggtctgcagctcccagcatgattgacacagaagacaagtgatctctgcatttccaactgaggtacctggttcatctcattggtactggttggacagtgggtacagcccacggagggcaagtcaaagcagcttggggcatcgcctcacccatgaaatgcaagggcctgggggatttccctttcctagccaagggaagccatgacagactataccgggaaaatcaggacactgccacctaaatactgtacttttccaacagtcttagcaaatgacacaccaggagattacatcctgtgcctggcgcaggaggtcccacacccaaggagccttgctcactgctagtgcagcagtcccagatcgaactgcaaggcagcaagcctggctgggggaggggcttccgacattgctgaggcttgagtaggtaaacaaagcagccgagaagctcgaactgggtggagcccaccacaggtcagtgaggcctgcctgcctctgtagactccatctctgggggcagggcatagctgaacaaaaggcagcagaaacatctgcagacttaaacatcactgtctgacagctccgaagagagcagtggttccccagcatggcgtctgagctctgagaactgacagactgcctcctcaagtgggtccctgacccccatgtagcctaacttggagacaccacccagtaggggccaagtgatacctcatacagctgggtgcccctctggaatgaagcttccagagcaaggatcaggtagcaatatttgctgttctgcagcctccactggtgatacccaggcaaacaggttctggagtggacctccagcaaactccaacaaacctgcagctgagggacatgactgctagaaggaaaactaacaaagagaaaggaacagcatcaacatcaacaaaaacgacatctacaccaaaaccccatctgttggtcaccatcatcaaagaccaaaggtagataaaaccacaaagatggggagaaaccagaacagacaagctgaaaattctaaaaaccagagtaccccttctcctccaaaggattgcagctcctcgccagcaatggaacaaagctggacagagaataactttgacgagttgacagaagtaggcttcagaatgtcagtaataacaaacttctctgagctaaaggaggatgtttgaacctattgcaaggaagctacaaacctagaaaaaagattagatgaatggctaactagattaaacagtgtacagaagaccttagatgacctgatggcactgaaaaccatggcacaagaactatgtgatgcatgcacaagcttcagtagccgatttgaacaagtggaagaaacggtatcagtgattgaagatcaaactaatgaaatgaagtgagaagtttagagaaaaaaagagtaaaaagaaatgaacaaagcctccaagaaatatggattatgtgaaaagaccaaatctatgtttgattggtgtacctgaaagtgacagggagaaggaaccaagctggaaaacattcttcaggatatcatccaggagaacttccccaacctagcaagacaggccaacattcaaattcaggaaacacagaaaatgccacaaagatactccttgagaagagtaactccaagacacataattgccagattcaccaaagttgaaatgaaggaaaaaatgttaagggcagccagagagaaatgtcgagttacccacaaagggaagcccatcagactaacagctgatctctcagcagaaactgtacaagccagaagagagtgggggccaatattcaacattcttaaagaaaataatttttaacccagaatttcatatccagccaaactaagcttcataagtgaaggagaaataaaatcctttacagacaaacaaatactgagagattttttcaccaccaggcctgccttacaagagctcctgaaggaagcactaaacatggaaagaatcaactggtaccagccactgcaaaaacatgccaaattgtaaataccatctatgctaggaagaaactgcatcaactaatggacaaaatagccagctaacatcataatgacaggatcaaattcacatgtaacaatattaacctgaaatgtaaatggactaaatgcctcaattaaaagacacagacaggcaaattggataaacagtcaagacccaccagtgttctgtattcagaagacccatctcacaggcagagacacacataggctcaaaataaacacatggaggaatatctaccaaggaaatggaaagcaaaaaaaaagcaagtgttgcaatcctagtctctgataaaacagactttaaaccaacaaagatcaaaagagacaaggccattacataatggtaaagggatcaattcaacaagaagagctaactatatatgcacccaatacgggatcacccagatttataaagcaagtccttagagccctacaaagagacttagactcccacacaataataatgggagagtttaacaccccactgtcaatattagacacatcaaggagacagaaggttaacaaggatatccaggacttgaactcaactctgcaccaagcagacctaatagaaatctacagaactctccaccccaaatcaacagaatatacatcattctcagcactacatcacacttattccaaaactgaccacataattggaagtaaagcactcctcaggaaatgtaaaataacagaaatcacaacaaactctcagaccacagtgcaatcaaattagaactcaggatgaagaaactcactcaaaactgcacaactacatggaaactgaacaacctgctcatggatgactactgggtacataacgaaatgaaggcagaaataaagatgttctttgaaaccaataagaacaaagacacaacataccagaatctctgggacacatttaaggcagtgtgtagagggaaatttatagcactaaatgcccagaagagaaagcaggaaagatctaaaattgacaccctaacatcacaatgaaaataaccagagaggccagagcaaacaaattcaaaagctagcagaaggcaagaaacaattaagatcagagtagaactgaaggagatagagacataaaaacccttcaaaaaatcagtgaatccagaagctgttttttgaaaagatcaacaaaattgatagaccactagcaagacaaataaagaagaaaagagagaagaatcaaatagacacaataaaaaatgataaaggggatatcaccaccgatcccacagaaatacaaactaccatcagagaacactataaacacctctactcaaataaactagaaaatctagaagaaatggataaattcctggaaaaatacaccctcccaaggctaaaccaggaagaagttgaatcgctgaatagactaataacaggctctgaaattgaggcaacaattaataacctaccaaccaaaaaaattccaggaccagatggattcacagctgaattctaccagaggtacaaagaggaggtggtaccatcacttctgaaactattccaatcaatagaaaaagagggaatcctctctaactcattttatgagaccagcatcatcctgataacaaagccttgcagagacacaacaaacaaagagaattttagaccaatatccctgatgaacattgatgcaaaaatccccaataaaatactggcaaaccaaatccagcagcacatcaaaaagcttatccaccaagatgaagttgatttcatccctggggtgcaaggctatttcaacatatgcaaatcaataaacgtaatccgtcacataaacagaaccgaagacaaaaaccacatgattatctcaatatgtgcaaaaaaggttttgacaaaagtcaacagcccttcatgctaaaaactcccaataaactaggtattgatggaacatatctgaaaataagagctatttatgacaaacccacagccaatatcatactgaatgggcaaaaactggaagcattccctttgaaaactgtcacaagaaaaggatgccctctctcaccactcctatttaacatagtgttggaagttctggccagggcaatcaggcaagataaagaaataaagtgtattccatcaggaaaagaggaagccaattgtccctgtttgcagatgacatgattgtatatttagaaaaccccatcgtctcagccgaaaatcttaagctgataagcaacttcagcaaagtctcaggatacaaaatcaatgtacaaaaatcacaagcattcttacacaccaataacagacaaacagagaaacaaatcatgaatgaactcccattcacaattgctacaaagagaataaaatacctaggagtccaacttacaaaggatgtgaaggacctcttcaaggagaactacaaaccactgcttaataaaacgaaagaggacacaaacaaaaggaaggatattccatgctcatggataggaataatcaatattgtgaaaatggccatactacccaaggtaatttatagattcaatgcctccccagtcaagctaccaatgactttcttcacagaattggaaaaaactactttaaagttcatatggaaccaaaaaaagagcctgcattaccaagtcaatcctaagccaaaagaacaaagctggaggcatcacgctacctgacttcaaactatactaaaaggctacagtaaccaaaacagcatggttctcataacaaaacagagatatacactaatggaacagaacagaagcctcagaaataacaccacacatctacaatcatctgatctttaaaaacctgacagaaacaagacatggggaaaagatttcctatttaataaatggtgctgggaaaactggctagccatatgtagaaagctgaaactggatgccttatttacactttatacaaaaattgattctacatggattaaagacttaaatgttagacctaaaaccataaaaatccctagaagaaaacctaggcaatatcattcaggacataggcatgggcaagtacttcatgactaaaacaccaaaagcaatggcaacaaaagccaaaatagacacatggcatctaattaaactaaagagcttttgcacagcaaacgaaactaccatgagagtgaacaggcaacctacagaatgggagaaaatttttgcaatctactcatctgataaagggctaatatccagaatatacaaggaactcaaacaaatttacaagaaaaaccaaacaaccccatcaaaaagtgggcaaaggatatgaacagatacttttcaaaagaagacgtttatgcaaccaacagacacatgagaaaatactcatcatcactggccatcagagaaatgcaactcaaaaccacaatgagataccatctcacaccagttagaatggcaatcattaaaaagtcaggaaacaacaggtgctggagaggatttggagaaataggaacacttttacattgttagtgggactgtaaactagttcaatcatgtggaagacagtgtggtgattcctcaagtatttagaactagaaatacaatttgacccagccatcccattactgggtatatacctgaaggattataaatcatgctactataaagacacatgtatatgtatgtttattgcagcactattcacaacagcaaagacttggaaccaaaccaaatgtccatcaatgatagactagattaagcaaatgaggcacatatacaccacggaatactgtgcagccataaaaaaatgatgagttcatgtcctttgtagggacatggatgaagccagaaaccatcattctgagcaaactaccacaaggacaggaaaccaaacaccgcatattttcactcataggtgggaatttaacaatgagaacacttggacacaaggcagggaacatcacacactgggtcctgtcgtggagtgggagttggaggagggatagcattaggaggaatacctaatgtaaatggtgagttaatgggtgcaagaaacgaacacggcacaattatacaagcacatgtatacatatgtaacaaatctgcacgttgtgcaaatgtactctagaacttaaagtataatttaaaaaaagagggagagaaaaaaagaaagttactctgaaaaaaaaagaattccattgggagatcatcatggctgaccacagacattctaatgggagagatacctggccaactgcaggcattctaacaggggagacacctaactgaactcaggcattctaaagggagaaaaacctggccagccacattcattctaacaggagtgacacctggccgacctcaggcattctgggagagagacatttggccgacctcatttattctaaacagaaagacgtgtggccgactttaggaattttaacaaaagagacacctggcctacctcaggcattataacacaagagacactcctggctgacctcaggcattctaatgagagtgacacctggctgacctcattcattttacctggagagactcctggccaaatttgggcattctaatgggaaagacaccttgctgatctctggcattctaatgggagagacagctggcggcttcattctaacaggagagacacctggccaaccacaaacattctaaggagagagacacctggccaacctcaggcattttaacaagagagacaactggtcgacctcaggcattccaagaggaggatctcttggctgtactcaggcattctgattggagagactcctggccgatctcaggaattctaatagaagagacaccaggctgacctcattcattctaatgggattaactcctgcccaacctcaggcattctaacagagaaacctgggcaaccgcaggcattctaaggggagagcctcctggctaacctcaggcattctatgggaagagacccctggcagaactcaagcattctaatggaagagactccttgtcaacctcaggcattctaaaaggagagtctcctggttgtcctcaggcattctaactggagagacgactggccgacctcaggaagtcttgggagagacttcctgctgacttcagacattctaatgggagagaatcctggctgacctcaggcatcctaagggaagagacacctggccgacctcaggcattgtaatgggagagacacctggctaacctcaggcattctaagggaagggactcctggctgacctcaagaattctgagtggagaaacatctgccctacatctggcattctaaagggagggactcctggccgacctcaggcattctaacgatagactcctggctgacctgagacattctgagaggagagactcctggccgagctcaggcattctaaggggagagactcctgaccgacctcaggtattctgagtggagagacacatgtcatatatcaggcattctaaggggagaatctcctggtaaatctcaggcattctaatggtagagactcctggctaacctcagacattctgaagtgagagactcctggccgacctcagacattctaatgggagagacacctagctgacctcgggcattctaaggggagagacatctggccaacctgattcattctaatggtagagacacctggccgaacacaggcattctaaggggagagccacctggccgaccacaggcattttaaggagaaagatacctggccgacctcaggcattctaacgagtgtgtctcctggccgacctcaggcattctgacgagggacaactggccaacctcagggattccaacagggcagacacaacgttgacgtcattcatcctaactggtgaaactcctgtcaaacctcaggcattctaatgaaagagacacctggccaacctcagacattctaacacaagagacacttggccaaccttaggcattctaaggggagagtctcctggccaatcccaggcacttgagagaaacagctggctgacctcaggcattctaatgggagtgagtcctagctgacctcaggcattctaagaagacatgctcctggccgaattcaggcattgaaatgggagagattcctggctgtcctccggtatgctaaggggagaaagacctggctgacctcaggcattctaaggggagaaacacccggctgacatcaggcattctaatgggagagacatctggctgaactcaaggattctaatgggagagacagctggccaatctctgacattcaaacaggaggatctcctgtccgacctcacacattctgagttgagagatacctgaccaacctcaggtcttctaaagaaagagacacctggccgacctcaagcattctaatgggagagacacctggccaacctcattcattctactggaagagatacctggccaacctcaggcattctaagaggagagatacctggccgacctgttcatactaagaggagagattcctggcttaccacaaccattctcacaggagagtcctggccgatctcaggcattctaatgggagaaactcctggttgaattcaggctttctaatggggagacatcaagccaacttcattctttgtaatggcagatacacctggccgatctcaaacattctagtgaaagagacacctggctgacctcaggcattgtaaggggaggggtccctggccgacatcaggtattctgagtggaaagacacctgccctatctcaggcattctaaggggagtctcctggtcgaccacaggcattctaaccatagagagtctttgtcgacctcaggcattctgagaggagagtctcctggccaatctgattcattctgatgggacagacacctgtctgaccacagatattctaaggggagaaacactggccaaacacaggcattctaatgagaaagacacctggccaacctcaggcattcaaagggagagtctcctggtggacctcattcattttgatgggagagacaccaggctgacctcatttatcttaatggtaggcacctgtccgaccatcgtcattctaatgggagagactcctggccgacctcaggcattctaacatgagacacctggccgacctcaggcattctaaagggagtgtctcctaggcgatcacagccattctatgggtagagacacctggtctacctcagggattctaatgagagaaacaactggccaacctcaggttttctaacagagactcttggccaacttcgggcattcaaaagattgagactactggccaacctcaggcattctaatgggggagaaatgtggcagacctcaggcattctaacgtgagagtcttctggatgacctcaggcattctaaggggagagacacctggccaacctcaggcattataatggaaaggactcctggcctaactcagggattctaatgggagagacagccagatgatctccatcattctaaggggaggaactcctggctgacatcaggcattctgaggggagagtctcctgtccaaattcaggcattctgagtggatagacacctgaccaacatcaggcatctaaggatagggacacctggctgaactcaagcattctaaggggagagacacctggttgacctcattcattctattgaaagagatacctggccaacctcaggtattataaggggagagacgcatggctgacctcatccatactaagaggaaaggctcctggcttacctcaagtattctttttttatttttttttccttttttcatatatatatatatatatatatatatatatatatatatttttttttattatactttaagttctagggtacatgtgcacaacctgcaggtttgttacatatatatacatgtgccatgttggtatgctgcacccattaactcgtcatttacattaggtatatctcctaatgctatccctcccccctcctcccaccccataacaggccccggtgtgtgatgttccccttactgtgtccaagtgttctcattgttcaattcccacctatgagtgagaacatgcggtgtttggttttttgtccttgcaatagtttgctgagaattatggtttccagcttcatccatgtccctacaaaggacatgaagtcatcattttttatggctacatagtattccatggtgtatatgtgccacattttcttaatctagtctatcattgttggacatttgggttggttccaagtctttgctattgtgaatagtgctgcaataaacatacgtgtgcatgtgtctttatagcagcatgatttatattcctttgggtatatactcagtaatgggatggctgggtcaaatggtatttctagttctagatccctgaggaatcgccacactgtcttccacaatggttaaactagtttacagtcccaccagcagtgtaaaagtgttcctatttctctaaatcctctccagcacctgttacttcctgactttttaatgattgtcattctaactggtgcgagatgatatctcattgtggttttgatttgcatttctctgatggccagtgatgatgagcattttttcatgtgtctgttggctgcataaatgtcttcatttgagaagtgtctgttcgtatcctttgcccactttttgatggggttgtttgtttttttcttgtaaacttgtttgagttctttgtagattctggatattagacctttgtcagatgggtagattgcaaaaattttctcccattctgtaggttgcctgttcactctgatggtagtttcttttgctgtgcagaagctctttagtttaattagatcccatttgtcaattttggcttttgttgcctttgcttttggtgttttagacatgaagtccttgcccatgcctatgtcgtgaatggtattgcctaggttttcttctagggtttttatggtttcagttccaaaatttaagtctttaatccatcttgaattaatttttgtataaagtgtaaggaagggatccagtttcagctttctacatatggctagccagttttcccagcaccatttgttaaatagagaattgtttccccatttcttgtttttgtcaggtttgtcaaagctcagatagttgtaggtgtgtggtattatttctgaggcctctgttctgttccattggtctatatctctgttttggtaccagtaccatgctgttttggttaccgtagccttgtagtatagtttgaagtcaggtagcgtgatgcctccagctttgttcttttggcttaggattgacttggtaatgcaggctcttttttggttccatatgagctttaaagtagtttttttccaattctgtgaagaaagtcattggtagcttgatggggatggcattgaatctataaattaccttgggcagtatggccattttcaaaatattgattcttcctatccgtgagtatggaatgttcttccatttgtttgtgtcctctttcattttattaagcagtggtttgtagttctccttgaaaaggtccttcatatcccttgtaagttggattcctaggtattttattctctttgaagcaattgtgaatgggagttcactcatgatttggctctccgtttgtctgttattggtgtgtaggaaagcttgtgatttttgcacattgattttgtatcctgagactttgctgaagttgcttatcagcttaaggagattttcggctgagacgatggggttttctagatatacaatcatgtcatctgcaaacagggacaatttgacttcctcttttcctaattgaatacactttatttctttctcctgcctgattgccctggccagaacttccaacactatgttcaataggagtggtgagagagggcatccctgtcttgtgccagttttcaaagggaatgcttccagtttttgcccattcagtatgatattggctgtgggtttgtcataaatagctcttattattttgagatacatcccatcaatacctactttattgagagtttttagcatgaagggctgttgaattttgctgaaggcctttcctgcatctattgagataatcatgtggttttcatctttggttctgttatatactggattacgtttattgatttgcgtatgttgaaccagccttgcatcccagggatgaagcccacttgaacatggtggataagctttgtgatgtgctgctggattctgtttgccagtgttttattgaggatttttgcatcgatgttcatcagggatattggtctaaaattctcttttttggttgtgtctctgccaggctttggtatcaggatgatgctggcctcacagcatgagttaaggatgattccctctttttctattgattggaatagtttcagaaggaatggtaccagctcctccttgtacctctggtagaattcggctgtgaatccgtctggtcctggactttttttgattgataagctattaattatttcttcaattttggagcctgttattggtctattcagagattcaacttcttcctggtttagccttgggagggtgtatgtgtcgaagaatttatccatttcttctcgattttctagtttatttgcatagaggtgtttatagtattctctgatggtagtttgtattcctgtggtatcagtggtgatatcccctttatcattttttattgcatctatttgattcttctctcttttcttctttattagtcttgctagcggtctatcaattttgttgatctttaaaaaaaaaacagctcctggattcattgattttttgaaggggtttttgtgtctctatctccttcagttctgctctgatcttagttatttctcgccttctgctagcttttgaatgtgtttgctcttgcttctctagttcttttaattgtgatgttagggtgtcaattttagatctttcctgctttctcttgtgggcatttagtgctataaattaccctctacacactgctttaaatgtgtcccagagattctggcatgttgtgtctttgttctcgttggtttcaaagaacatctttatttctgccttcatttcgttatgtacccagtagtcattcaggagcaggttgttcagtttccatgtagctgagcggttttgagtgagtttcttaatcctgatttctagtttgattgcactgtggtcagagagacagtttgttataatttctattattttacttttgctgcggagtgttttacttccaactatgtggtcaattttggaataggtgtttacctcaagcattctaagggaaaagtctggccaacatcacatgttctaaggggagagacatctggcagacttcaggaactctaataggagagacacatgggtgacctcaggcattctaatgggaaagacacctggtccacctcaggcattctaaggggtaggactccaggccaacctcaggcattctgagtggagagacacctggctgacctcaggcattctaacagaagagacagctggccaacctcattcgttctaatgggagatatacctagacaaccacaggcattctaaagggagagacacctggctggccttatttattcattgtaatgggagagaaacctcgctgacctcattcattgtaatgggagacacaattgactaactgcaggcatatttaacaggagagacatctggccgacctcaggcatcctaaggggagaggcacctgacctacctcaatcatcctaacagaattgacacctgtctggcctcaggcattctaataggagagaaacctggccgacctcaggaattctaaggggaaagacacatggccaacctcaggcattctaacaggtgagacacctggcccaccaaaggcattgtaattatagagacacttggctgacctcaggctttccaaggggagggacacctgtatggccggatggcctcattcattctaatggggtgacaactggcctactttaggcattctaaggagagtctctgggctgacctcaggcattctatggagagaaacacctggccatcctcaggcgctctaactgaagagactcctggccaacttcaggcattctaaggggagagacacctggttgacctcagtcattctgacaatttgttgtcaatatttgtaaaaattacttcccacatagaattttagagtgctggcttttcttcaaaaaacagagaagatctgggatactctatgccagtgtgaagtaacaagaataaatgaataaatttaaaaattagaaaaaatcatttggctgcagctaagtaacatccttttattttagtctggccatgcattttccaattctctaggactcccttactcagtagtgctttatggccaactttttaaaaataaatttacctgctagtatcctgtatgcataggatttatgacactgtaatgaaataaccaacagtgcatccatacaacagtgcaccagttattcattaaactaggtaaaacatgttattataaacataatctatttatttgcatgtctccgtgttgttttgttttgagatagagtctcgctctgtcgcccaggctggagtgcaatgacacaatctcagctcactgcaacctccgcctcccaggttcaagtgattctcctgcctcagcctccagagtagctgggattacagccatgtgcaaacatgacaggctaattttttgtatttcagtagagacccagtttcaccgtgttagccagaatggtcttgatctcctgacctcatgatccacctgcctcagcctcccaaagtgctgagattacaggcgtgagccaccacacctggccatgtgtttttgagaaaaggtcttgctctgtcacccaggctggagtgcagtggcacaaacatggctcactgcattttcaacctccctggctcaagcaatccttccacctcagcctcctgagtagctgagaataaaggcatgagatatcatgcctggattatgttatttatttatttattttgtagacatggggtctcactatgttccataggttgatcttaaactcctgggctcaggcaatcctcctgccttgacctctcaaagtgctgagattataggcatgacccaccatcccaggcctgtgttattgttgttattttatgttgcataaaaaatcacaaagtgagtggtttgaaaaattagaagtctattatctcacaggaggccaggaggccaggcacagattaactgagccatctgctgttacatttgggatgatggagaataaaagccatctttttaaaaaaatcttatctgcaagggaaacatccctaatcactagaatgtcatattattaacacaagatttgtttctattttaattagaaaactatagagtatgcttagaccagtagcaaatggctcttccttgctgtggtttgggggacattggcaggtggtgagtattattctattcaggcctcttgcctaacttggttttagaaggcatgaggttctttatggttctatgtctgtgggtaaggctgcagctgctgattatgctaattcttgcttccttgcaaatagccaactccttattttgtgcattgccagctatcaacagagacattttaggaataattttcatgttaaaggcaggctttgttgtagtgtcctactgtgaactgtcccagcattagacccatcagaggtttgtgaagagagctctgatgttagaacagtgagcacagtactctgccaatttgcccattacctcttctgtctcccctagcaggaactactgtctggctttctcaagaggaacatgaattgctgctctaatggactgttcatggatttgagatcttattttagttagggaggttgagactttcatggcttcataattgatgcttgagaaaacattctttctaattggaaattctaacaatctccataaagcctgttttgctgtccctaaggctttgaatgcattcttgtttggtaatcagaatgaaaacaaacttttcaaagcaaataattgtgtttttttgttgttgtttgtttgttttttgagacggagttttgctcttcttgcccaggctggagtccaatggtgcgatatatgctcactgcaacctctgcctcctgggttcaagtgattctcctacctcagccccctgagtagctgggattacaggtatgcaccactatacccagctaattttgtgttttttagtagagacggggtttctccatgttggttaggctggtcttgaactcctgacctcaggtgacctgcccaccttggcctcccaaagtgctgggattacaggcatgagccactgtgcccagccaataatggtgttcttgacctttattttgggttatattctatttatatgttataatctaaatttaattttatttgattttgtggaagaagtagagaaaattagtttgctttttaattgatattactttaaatgaaaaaggaaacaagttagtaaatctaagagcatttaattttcacttttttttcttaccattgtctctgcttagccatctttttagttattagatgaattaggatactttttgcatgagaaatactttgacactcatgtatatcaatgaaagtgtgcctctgcttttgattttggtttactacttaaattactcttgaattatgctgacaagatccatctcaagtttctcaaagcataatgtgaggagagaaaaaattctacatgcttggggtttccttgaaggaaaccacaaaatccctgatgcctcaatgaacatgcagacctcccaggctgcctaagcatagaatgttaattctgaacacctaatttcttccagatctttccctccccgcttacgtggggcagatatcaacatatagtaatttatttaaagaagtatctgctcactgctatctttgggtcaatgcttgtgctaagctctgagattacagggataggttaactagattcctccttaaatgaattaagacttagagcaaaaaaatacaaataagtaataattgcccttaactttcttttgggtgtggtgaaaggcagctgggaaagatctttagtatcagtgagggcataggtaagccttcattgcacacagcatgttgagcaagggtcccaaatgggaataaatgggtgaagaaaatttcaggaaagaaaacagatcatagtttagagaacctgaatattagactaacctggattcaaatcctgccagcactgcacattagctgtgtaaccaaacaaagatctttaccattcaacatttgctggatacaaggttaatatacaaaatgtaatcactttcctatatatcagcaatagatacctgaaatttgaaattaaaacaccataacatttatattagcatcccccaaaataaaatacttggctaaaaatctaacaaagtatgtacaagatttatataaggagagccataaaactatgatttaaaaaatcaaataattgaagaaattgatagatactacatgtttatggatagaaagattcaatattgtcaagacattggttatttctaatttgacatatagacttaacacaattaaaataaaaatcccaacaaattatttcatggaaatcaacaaactgatgctaaagtttacatgaaaaggcaaaagacccaggataaccaacattagaaaaaatgaaaagccagaggactgacactacccatgttcaagacttactataaaactacagtaaccaaaagagtatggtattcataaaagaagataaaaagagattaatgcaacaggttatagagcacaggtatagacccacataaatataatcaaggagcaaaggtaatacaatgaggaaaagatggtcttttcagtaaatagcactcaaacaacaggatatacatatgaaaagaatctacaaacaggctttacactgcttaaaattaactcaaaatggatcataagactaaatgtaaaatgcaaaactgtaaaacttctgggaaatagcataggaaaagagatctacactaccttgggcatggtgatggcttgttagatacaacaccataggcatgacccatgaaagaaacaattgataagctggccttcattataatttaaatcttctgttctgccaaaggtactgtcagtagaaggataacacaagctatagactgggagaaactatttgcaaaagatatatctgatacagtacttctatctaatatatttaaaaaattaaaactcaacaataggtaaaaaagcttaattaaaaaacacaggcaaaagacctgaacagatactttatcaaaaatatatgtagatgccaaataagtacaagaaaagatgccccatataatatgatattagaagatttcaaaataaaatatcaataagatatgattatacacaaattacaatggtccagattcagaacactgacaacaccaaatgctggtaagcacgtggagcaacaagaactctctttcattgctggtgacacaaaatggtgcaaccacttttgaagacagtttgacagtttcttacaaaaccacacatagtcttataaaattcagcagttgtgccccttagtacttacccaaatgtgttaaaaaccttatgcccacccaaaaacctatgcacagatatttatagaagcataattaccaaaacttgaatgatgaatgaacattatatctagacaattaaatcttattcagttatttaaaaaaagaactatcaagacatgaaaaaacatggaagaaacaaatacctgttgctaaatgaaagaagccaatctgaaaatgctacatactgtatgatttcaactatatgatattctggagaagacaaaactatagaaacagtgaaacaatcagtgatttccaggggttgagaggagggagggatgaataggtgaagcacaaacaatttttaagacagtacaaatattgtaatgtgtactatacatatactgtattatagtatcatactgcattatattctgtataataatataatagtggatacatgtcgttatacatttgtcattagaatgtacaacatgaagagtaaattctaatgcaaattatggactttgggtaatagtaaaatgtaaatattgattcattaattgtaacaagactgccatgctggagggaaaagctgtgcatctgtgagggaagggaggatgtgggacatatctgtactttccgttcaattttgctgtaaacttaaatggtcctaaaaaataaaatctatttgaaagggggaaaaagacatttgaaattttaaacacataatgaaaatgcccaaattgtggtgataaaattttctgtatcttgattttattaattttaatattctggttgtaatattgtactagaattttaaattactttgtcccagattttttaaaataacttccctgaccacattattgttggccacctcctccatagtatctttaatctctttatagcacttattaccataaaaaaagcattctacactgacttaattatatgcctattgtcttcttccccttcataatgtaggctccacctgaacacaaaaacagtatttgcacctagtagctgcttgatacctatgtagtcactaaacatttgagtgagcagatttagttacagttatgatgataatggtaataagaggctgaggcaggaggttcactggagcccaggagttcaaggttgccatgagctgtgatcacgctactgcacttcagcctggggtacagagcaaaaccctgtctcaaaaacaaaaatggtgataatgatgattatggtgctgctaatgataacggtggtgaggatggtggtggtgatgacgatgttgatggtgatgatgtggactatgatgatgatagtgatgatggtgatgatgatgattataatgttgatgatgatagtcatggtgataacgatttacagtaagtttagctgtggtgggtcacattgctgtccattctcaaagatcagtcatagagctggtgctttgccttctatatatctactgctcctctatgcaatgaggaccccaacttctgttggagctgtggcttagacttatcctgagctgtggaagttgaattatccattggaaacatttccttgcccccttgattggcaaggggtggtctgtggtctttacagagcatctctagtctaggatggactctgcttctcttcataatcttttaatttaacccacataaaactttaaggcaggctgggtgcactggctcatgcctgtaatcccagcactttgggaggccaaggagggtggatcacatgaggtcaggaattcaagaccagcctggtcaacctggtgaaatcctgtctctactaaaaatacaaaaatttagccaggcatagtggtgcgcacctgtaatcccagctacttgggaggctgaggcaggagaatcacttgaacctgggaggcagagtttgcagtgagccaagattgcaccattgcactccagcctgggtaataaagcgagactttgcctcaaaaaacaaacaaacaaacagaaaacctctaaagcaaagacccacgtataatcctcatttgaagtattgaactgagacttagagacgtcaaggaatatgctcatttgccaagatagaaattggcaataggtgggaaaaatatctcactccaaagtttagattaactttttgacactatgttatatgactatagaaccatcccctttataaataagatccatgatttgtctttctttcataagcttgtgaggaagttctctgcatcatcctaagcttgggaacacctattattccttggtgttttttttttttttttttttttaacctatatgctgtgccttttcaagtccaaactcagtgtagatcatggttcatagatttcagagtggacaaatacatctggatctggcattagtctctttcataatctactaattatttacaaaagattggtggtgaccagtattttattaagtatttttggaaaagtctcagttcataaatattctaagctaaaaatatatttagaaagccaaatctgaactgaatttttgatgcacgtaactcttcttttcaaaacttactcagccactctgaaaattttccctcccataaaggacatgttgttagcttctcagagcaccttgctttttgtattcaggaaagtctttttattttcaatttgttatttatgtccttcacaatttttctaattttctgttttcagtagataagaaacatactggtatttggattttctataagaggagaatcaataaatgaataaaagaaggaagatggtatcctatgaggatgataattaggagggactgtatgaaagaaaataaattgctatcacctgaaaaaacataccatatttctagtcttggttcaggcaaatttaatgatgggaacttaaataagtctcctgcttcccaaggctgcttcttaaccatacaagtataaattccatgttcctcagtgatgcatccctgcttgtgacatgtccacctgttcaaaccttatcattaaccacttcacctttcatttcctccttctgaacattttgacatcaggttactgaactgcaaggatcagacagggatactgaggaaaccattgccatggtttctagcaatccagactcactcatgaacttcttgggagaatgagccctactgtggattcccagtccagaatcaacaggaaataaattgagtcacattatctctgacttcccagtaaactgcagaatgtcaaaaacctagtagccttcattcaatatgtgaactaaattgaaagatataaacaggttgtttctaaaatcatttttgttccaatattttgtttaatttactgcatgaaagaccaaagactagtatactagtctgttctggcattgttataagaaaattcctgagactgggtaattcataaagaaaggcatttaaccagctcacaattctgcaggctgtgcaggaagcacagtgccaggatctgcttctggtgaaggactcaggaagcttccaatcatggcagaaggcaaaagtggagcaggcagctcacatggcaaaagtgagagcaagagagcaaggggagagatccctcatactcttaaacaatcagatcacacatgaactcagagtgagaactcatgcatcactaaggggattgtgctaagccatccatgagggatctgcccccatatgccaaatacctaccaccaggccacaatttaaacagtggggattacatttcaacatgagctttgaaggggacaaacatccaaaccatatcacttcgtattcttaatttaatacagaatatcagactttggttccagctcaactcactgcagtcaccattggaaaatttattttatgagtaattaaatcttcttattcttttaatataatttatcaccactaacctgagtagctctatttcctcttggagctgtgcataataccactaagaaggtgcaaagactttccagagcatgggaacttaaagttctactatgtccacagcatcctctggctcaagcatagaaatcctgttccaggatgcttctaactgaaaattgtcatgtctgcattggctggaggaagtttttggaaaagcactgggaaggggtagtctggatttatcaggataccttatgacagagacaaatatcagaagtttaatacattctttaataaatgtaggtaagcatgatatgggtttgtcagctgttccatctcttacagctgcatcttctgcagcatgtggcctctcaaagattactgaggcaagataaagagcctaaggaggaggcccacaagctcttaactactccagcctggaagtgacacacatcacttgcatttacagctcattggccagaattagtcacattaccccaacataactgcaaggaaagctgggaaatttaggggagaacatgagacatttggtcggtacaaactgctctgctacacacccctagatattttgggttttgtcaaaatacattgtaaaactcagttggaacagtcaacaacagaagaggaccattcttaattcctcttattagagatttcaccaattttctgtcttttagtttgttctgtttggccttcacattatcctattgtgtcagttattctgagcagagtaaagcaagaaaacacacgagaaagaatagttttagagaatgtaatggatcaatggtattcccccttctaatagcttatttttatgcctattacctggagttgttcttctaatgagccttaaatgactgctgcaaattgacactcagaattgatgccctgattgcttcctgaacatcctacaggaaagttaatctgcgggacttcctgaccccaccttgtcttctattttatttcaataattagtatttaattagtgcatctgggcttttctcacctgccttttggttctgctgctgtccaggaccagatataaggtaaactgtgacccagactgctcaagagttgagttcatgaagtgatgaaaactttacccatcttaattagccctcacagagaagcctgacttcaaatccttagtaacccccgggggtcttgcttctctcgatactcagcagcaaagtgaggtatgcatactgcaatgggtacttggagtgaccagtgtttgaatagttttattttgccacactctatatgtgggtgtgggttaaatgatactcaagaggcaacaaaagtttttcaggggaattgtgggtggccatcctggaacgagtatcttctagctttctctgtcctgttgtgtcctacactgccaccagttcaaactttgctggggttcagagaagaaacaagcaacttggacttctctccctgttcctgggagcaccatcgggctcccaaaatagcatacagaccacggagggtacagggggccttttggacagcttagagaacacatccaagcctatggctcaaaggcaggacctggtgaaggggaaggggatcagcctaaacaggatccagagtgtgaaaggatcaagaacctggcagggcaaggcaccagaatgtcctgaggcacctgtgtcctcacacaccagctctactggcttcacaggctccttcctagccaaacatcttccaaatcaagagatcagggtcaccttgcttgggggagtaaagcaaaaacaagagaaggcagaaagaatactgaccttggtattacaggaattattaagaaattattttaggtagataggataaggggtccttggtaaggtttttttgttaaaagcagctccagaaatgtttcttttctagtagaaaaacagctcaaagggccaggctggcaagctttgatatgcaaatggaagccattagaaactaggtccatctaatggtgattcctgccctcttctccttgtcaccacgtgtgccaagcatcatggccacccccagagatctccacgtatgcagaatatcatggtggcctgcatttgcatgttaagatgctggggccagttttttcatgggccatataaatgacatacctggtcaaaccaatcccctggttcatatgcaaatcagacacctcctcctccagcctccccatataaccaactttttttctgcttcactcagggtgtcctctctccgctcgggacagaagggacagaggtcccttccctctgtctctgtacaaggcagattcttccttctttttttgcctattaaagtctccactccttaaaaccactccacgtgtgtccgtgtcattttatctaaattggcacaagacaaaggaccttcgtgttcctccagtcatcggagctgtatcattttggtgctttggccaggaatctgaggtataacattcatcagagcggtgagtatgggagcaagctaaaaacaatttttttaagcgtaaattctttagcatgggccataaaagcaggatatagcgttcaatctagcatgcccccttcattaaaggggccttgcccaattacatagtttttcttgagatcctttttttttaagggaggcacacaggacacacacgtctaggacgtcaaagggaaataataggtgaggactagggctaactgggtaagtgtgaccaggcctcaaaagcctagttcctctggtgccatggcttgaagggttatgcccacagtcatgggcagcacatttaacagggtgctgggacccaggaatcaggaagggaaaatagttcggggaatgcccccactgttttcttcatcctaggtcacatatggaaagaaaggagactaaaagaatgcttttattctcacttctctttctagatgggtaacaaatcatcttcagcatggactctcctggagtgtatattttaaagcactgggactcctctgaccccgagactctgaagaaaagccacctcatattctgttgcacaaggcatggctttcttaccatcttgggaacagacaaacctggcctgctggggggaaacttaattttaatattatctaacaggtcttttctgctgacagaagggcaaatggactgacatcccctatgtgcactttctttgccctgcaagacaacccagacatttacaagttctgtacaattgacccagttcttttagcagccatggcaggaaagcccaggaaatagttccccagagtaaaggaaggttccagaagagcaatctaacacagctattgaatgtcccaacccttccagtctccctccaatcgtaccatcagctcctccagctccaccatctccagtatatcctactcttcctccttcacttttacctctgtaggaaatgtctgatgggaatggtgccatgagggttcaagttcccctctcattacagaaccttaaacaaataaagggagactcaggccaattttctgacaaccctaataggtacatagaaattttccaaaatttaactcaggtgtttgacctcacatggagggatattatgttgctgataagtcagaccctcactgcagctaaaaagcaggctgttctgtaggcagcaggaaaaaaaataagagttgagcaacatgcctcctatagctgaccaaggagaaaaagaagaagtagggaaggtgagaaagaggtggaaactccattcccattagaaacggaagctgttccagtaaataaccttaactggaaccccaataattcaggagataactgaaaaaggacacactttttaaggtgcatattagagggactatggaaaaccagggccaattctctcaattacactaagctgtccacaataggccaaagaccaaatgagaatcccacagactttatggaaaggctgagagaagcactaataaaacacacctcttttactcctaatttagtcaagggacagctcatcctgaaggacaagtttattacacaggcagctcacgatattagaaggaaactacagaagcaagttatagaaccagatagcaccctaaagaacctcctgagaatagccacttttttttttacaatagagatcaagaagaggcccaagaaaaaataaaggaaatacaagagaagaacagaacctctagcagcagggttgcaagcttgcaagtccaggattcccaagttacctccattagctgttactgatgtagcaagtcagggcattttaaaaaggaatgccctggaagcaagaccaagccacttcaaccctgtctagcctgtggcagagaccactagagatggatatgcccccgaagacagaggtcactgggttcagaaccagtttcacagatggtccagcaggactgacaggtcctgggactcaaacctctggttctggtgactcagactgccattacagcacaggagccctgggtaattctggaaattgaaggaaggaaagtaaatctccttctagatactgaagccagtctctctcttctcctctctaatccaggcctcccctcttcccatagcatgaccatagtggtgtctcaggaaaacatctaatccaatatttttttcaaccccttagctgcagatggggggacctactatttacacatgcctttttaatcatgcctgaaagacccactcctttattaggtagagatattctagctcacatgggggccagcatccttaatgccccaggacaaacttttttctcccccagtggaagctaacattaatccataagtgtgggtaagtcaaggaaaaataggctgacctataactgctaggctagtacagatctaccttaagtatcccacttctcttcctagccagagacagtatgccctaaggtcagaggttaggaaaaagctgaaagccataattaataacctaaagatgcagggcctcctcaaaccctgtaatagcccctgcaacaccccaatattaggagggcagaaacccaatggggaatggagactacttcaggaccttcacctcattaatgaagctgtagttccaatccatccagtggtacttaatccttgtatcctgttaactcaaatacctgagggaaataaatggtttacagtcctagatttaaaggatgcctttttctgcatagtattacatcctgactctcaatacctgtttgccttcaaagatccagccagtccgcccagttaacatggatgctgcctcagggacttcggggtagtcctcatctggacaggcactgtcaaaagacctctctgagttctctcatcctcaagttagggtcttgccataagttgatgatattctgctctgtgtcccaactgaggaagcttctcaggaaggcactgaagctcttttcaacttctcagctaacagaggacataaggtttcaaaacacaatgcccagctctgcaaaacctcagtgaagtacctagatttagtgttgtccaaggggaccagagcattaggagaagaaaggattaagcctatttcctcctttcccctcccgcaaaccctcaagaaactaagaggatttgggggcaatacagacttttgtagactatggatacctgggtatggtgaagtagcccatctgttgtataacctcatgaaagaaactcagggagctaacctctcttttaacctgagaacctgaaactcaaaaggcctgtgaccagctaaaccaagccttgctgaaggcaccagctctcagctttcctgtagggaaggccttcaatctgtatgtatcagaaaggaagggaatggtcctaggagttttaacacaggctcgaggaccagtccaacagccagtgggttacctaagtaggaacttgatttggtggctaaaggatggccagcctgcctctgagacattacttcagtggctctgatggtcccagaagcctccaaattaatcctgggaaatgatttaactgtttacactccacataacatggcaggactactgcattctagggggagcctttggttaatagatagctgaatccttaaatatcaagccctgctgttagaaggttccaacatccaattaaaaactagttctctcctaaatccagccaccttcctccccaaggaaactggggaacctgagcatgactgtgaacaagtcacagtacagacctatgcagccagggaatatctcagggaaactcccctagagaacgcagactggaccctcttcacagatgggagctcttttgtagaacaagggatcgtaaggcaggatatgcagtaatcactctaaatgacatcattgaaagtgcatctctccttccaggcacaagcgctcaattagctgagctaatagctcttacaagaacaattgaattaggcaaaggaaaggtagctaatatttacactgacttcaagtatgctttcttggttctccatgctcatgctgccatttggaaggaaaggcattttcttaccaccaatggatctcctataaaatgtcaccaggaaattaacaggttattaccctcagttttctttccatgagaaatagcagtgatgcattgtaggggacatcaaaagggaacagatgaggtagccgaaggaaatagattagctgatcaggcagctaaatcagcaacaaggaagcctcaagacatcaacatgcttcaaaaccctctaatctgggaaggctccataagagaaattaaacctcagtactcccctacagaaatagaattggccacttctctatggtatacatttcagctctcaggatggccacagtcagatggctacagtagccaatggatggctactccttccattgactggaggctggcaaactcaattgccagcctccagccagtggaaaatcatttaaatccttcaccaagctttttacttggaaaaagataaaacttatcaatatgcccaggaatcattttcaggagaggacttactaaaaacagtcaagcaaattgttaatgcttgtgaagtctgtcttaaaaataatcccctgaacaggtgactccttcttcctcaaacccaaagaataggaaattgtccagaggaacactggcagatagacttcacccacatgccaaagacaaaaggcattcaatacctgctgatatgagtagataccctcactaactagaagtattttcatgccatacagaaaaagcctctaaggtaataaaagtgttagttaattacataactccccactttgtctacttaagtagctttaaagtgacaatgggctgttgtttaaggcagctatcactcaaggggtctcaaaagcactagccatggaatatcatctccattgtgcttggagaccctaatcctcaggaaaggtagagaaaactaatgatattatgaagagacatttcagaaaattatcccaagaaactcatcttccttgggtcactcttcttcccatggccttactatgaataacaaataccccttcaaaattagttcttagccctattgagatgttgtacggatggctttttttcccaataattttctattagattgggaagactctgagctagttaagtatgtaacctctctggctcacttccaacaggaattagcacaattagtaaaagcccaaccccaggacattgaaccacctctatttaacccaggagatttggtactggtaaagtctctcccttctctctctctccctaaacccaagctgggaagggctttacactattgttctttcaacccctttggcaataaaagtcaaaggaatcaatgcctggatacatcacactcgagtcaaagcctggagagctgagggaacaacccctgacagcccagaggaatgtcctgaatatcaatgtgaagaaataggaggtcttaagctgaaaatcacaaaatataagtaactgagtgagatctactcatcttagtctcacccctacctcaccaaatactttttgttgtttctacctctcctttcagatttgttgccaaatattagaacttattttgatggaaattattgactatgccactcttgcaagaattgctatactcgtgctactatttgcattaggactatacactgtaccaccctctgggtggaatatcagacaggaatctcaattactgtacgattttgcttaattattatcctcatagcaggaataacagttcctaactggaagtaaacatgagcattttactatcactaagtgttaaaactttttactggacttagtaatacatcacaccctttagctcctacaatattcaccatagcccatttgtacaataagactaattgttgggtctgtcctaagtggctcactcagttcgatgacactaagaaaccttaaaatgacccagaacttgccatcttaggatttcatttgttggctttacctctaacctttaaagacttatcagtcataaatgggacatgatatgggaggactttcaactgggtaactaactcctctcagagaacattctgcccccagtgccaaagaacagtttccctaaaactcagcttcacaccctcaggttgggaaaagttggcctagtaacagcaaatgctttgaaagcagtggggaaagcccatatttgggctcaaatattgtaacatcacatttgtaattgttgatagttcaaagatttggggagaagactgcaacaaaggggatctaacaggatcagaagccctagtggggggctttcagaatctagcctctccttctggttggaagtcctatgatgggagtggcatgctctaaacaaccaccttgactacaatgtaaagaataacacatgggccttttcaaacatgcatgcttatagaattccagatccttgcacgacgtttgctaatagtagtggcttacagatctgtgggcaaactggagacatctggactgacagcccttgccacaaggatcatctgagatattggccagggtataaaatgtctaattttttgaaactccatttgttaggtggacccttctcacttggcatgtcaaattccaattggcatcataaatgactatcttaaatatggttatccttatcccaaggatgcccctattatgtgtaaggaaggggaatttctaagatatgagaaaagtctgccactgtctctcacaaaccacaacttggaaccatcccttcaagaaacagggctagatattccttgtggctcctagatacacttagttctcccaaggcattagaagggaacttgtattacagtagcagtagtttccaacttatttttaaattctactgagttggcagcatcatcatgggacatacctaacttaggctcttttctagaaactgcactatctcaaatacaccggacaaagagatctatcatttctaagccctcacatggagatttagctgaaagggcagactggggaagggcatgcacatgacaatcccaacttgaaaaaaaacatggatgggaaattctatagccagaggcctattctgatttacgggcatccctcttcttgaaagatcagtacttactgtctctattatgatgcaacaaggatggaaggtaactataagtgccatagaggcacaacaacaatctatagaccctttatcctcagtaacagcacaaaatagatgggccttagatgtcctcacagctgaagtaggaagtactggtgtgcacttttaaatgaaacatgctgcttctgaattaacacttctagtagaggaaaatctacaggtacgtaaagatcaaatcaaaagtattatcaggctaagagaatatgtaggcttcagtcccaggtggctacaatccctctttaataaattccagacttctttatggaattggttagctcctttattaagccccctcttgcttatatgtcttgtattaacatttgaacctgtacactcaatactataacttgaattgtttcctctgaaatcaaactccaaatggtgctgcaaaccgaaccatgcaggaacacgccattcttccaaggacacttatatcgaatccaggaggagccctaactgctgttccccaatcgacaccccttttcagcaggaagtagccagaaagagtcgttgcccaaatccccctaacagcagttatggtaacgtctcctcaggggcgaatattatatgagttattaagaaattgttttaggcagataagataagggatccttggtaagtttttttcttaaaagtaactcccaaaacatttcttttctagcagaaaaatggcttgaagggccaggccagcaggctttgatatgcaaatgccagccattacaaactgggtccatccaatatggggattcccatcctcttctccttgtcaccatgagtgccaagcctcaggccccccgccccgcctcagagatctccatgtctgcagaacatcatggcggtctacatttgcatattaaaaggctagggtgaaagggccagttttttcgcggtctacataaatgacatacctggtcaaaccaatcccctgggtcatatgaaaatcaggcaccgcctcctccagcctcctaatataacctactgttttccgctgcacttgtggtttcctctctccacttggagcccccctcactctgtctctgtacaagggagcttcttccttctgttttgcctattaaactctctgctccttaaaaccgctccatgtgtgtccgtgtcattttatataaattggtgcaggacaaaggaccctggtgttcctccagtcatcgaagccgtatcattggggtcaagaaaacctgggtttaaaactctgcttctgttgtgtgaccttagttaagtagctcatcctctctggactcagttaacttgtctatcaaatagatgagcctcaagttccagtctttcagaaacagtctgagtttcttttttatttatttttaatttttgtgggtacagagtaggtgtatatacttatggagtatatgagatatttttatacaagtagcaatgcatcaaaattacatcagggtaaatggggtatccattccctcaagcatttattctttgtgttacaaacaatccaattatatacttttagatatttttaacatacaattaatttatttttgaccctagtcaccctgttgtgctagcaaatactaggtttttttctatgtttttgtaccaattaaccctccccacatctcctcccactccactaccccttccagcctctggtaaccatctttctactctctaccttcatgagttcaatcgttttaattattagctcccacgaataattgagaacatgatgtttgtcttcaggaacaccaaccccacccctcagtccttgtcccaaacactcagctgtgatcttcctaaacgtgccacttttagcccaccaggagaggagggtgacaggctgggggaagtggaagggaaaggcaaaaggcagatggcagctggcaacttgatcctttttgattcctcttttgcctgagagaaaaagaatgtgcctggtaagaatttaggagggcagtggcttctcatgcaccaagccagggatgttctttagaactccttacacacaagccaaccctctccccatacagtccttagcctgccaaggagaagttgaaaaatcaagggacactttctctaccactcctacacacaaagcaaaccctgtctctagaggtgtgttgggacaagggtcatacctgcagggacccaggcttaaccctctcctgccaacaagctggacacacaccccatggaaggctctcctagtgaggcctttcctcatcagccccaagtactgctcagttcaggctcttctctcaagagggaatggttccaagttagggaaatcaaatggaatccatttgtcagcctggagaggcacgccagtggtccttgcctgctgctgtacatttagtctttccccatggttacaggacagtttctgagtccctgccattaagaatatgaccacagggactcatgtgactaatttggctgcagtctctgttctctgggtctcaggaagaccctacctggaaaggttttgatggcccttggcctggagtgcaggggatggaccaagcaatttgggggagtccctgttatttacagcttcattgtgtttatagcagacagagaactagcagtctacactacagatgagaacatttgaggtccagccaggggaagtgacttacccaagtgcacacaacatctttagtagcagattcaggactccaaccctagtctccaaatgctatcacggtgtttgctctgctctactgcactaatcttggaggctgtattagtccattttcacagtactataaagaactacccgagactgggtaattataaagaaccttaattgactcacagttctgcatggctggggaggactcaggaaacttacaatcatggcagaaggtgaaggggaagcaaggcacgtcttacatggcagtagaagagggaagtgccatactcttaaaccatcagatctcataagaattcactatcatgagagcagcatggggaaaactatcccctgatccaatcacctcccaccaggtccctcctttgacacatggggattacaactcgagatgagatttcggtgggggacacagagccaaaccatatcatagcccaaccatgacaacaccttctctgaagtgtggcctcctccaggagggaccatggatttctgtagatgtaggtggactctgggtgaaggtgccggggccaaagatcctcatgtctctccctccactctctctctccttccccagagccctgccctagtcttacgtaagatcagcagttgctgacagatgctgctcagcctcagcagggactgggtgagggcaagggctggagagggctttaagcaggcctttgggatggagcctggtgagccagccctgtgtcaggaagaatgtgtggcaggggatgggcagagtggggagatggtggtggggggtgttggctattttggcaggtgcaggaacaaagccacagaaatatgtgccccatgccatagatgcccatgtggccctccaggtgctcagataagctatctgaaaccagagcagatacacagggaacacggatggaaagtaaaccagctgtccctcttgagaatcctgataaagcagaggccacccaggcctgggattgcaggctgggagcagagtttgggggtagaaggcaacctccaagatgttccttaatctctgtgccaggatcttggaagtcagagggtaaaagcacacctacagctgtacttgagctgatgctgtggatacacactcctaaatctatgtggggacagttttgcctactaggaaaggtcaccccatgaccagactactggctccttttaatgggctgagcagtgttggcaggctgctggctctgcagggctcagtgagaacatctgcaacatggatcttctccatgaaccccaaggccatgtggcaagccctcctcccagggaatggacttaaagtgctacaagaggtcagatacaaagcagagttttcattcaaaaacctaaaacaggaaactgtttgaggggggtagtgaggaccgataaagatcatttcccagtggttttaaaatcaagggatgtaagaccacaatctgctaaagctaccagattataaatccatagttcaggacccaggaggtctattggcttgcacatggatgcctatgcatgtgcatgtttgtgttcgttgatggcacattgtaggttcagtacataatgaaaatgagagaggaggaaagcaagtctggtggcagctgagctgactcttccacttgatctgtctctgaatcctcacagcccaggtcctgcctggctctgaaggagaaatggtcctctggaccaggccttcccctcccccatgagccccccgaaacctgcagatcttgcctacttgcgatccacactcttctgtttgtggacaaagaatgaagtcttgccattatctgctcccttctccagtcactcaaccacatgtcctgccttccagtcctcaaattcttctctcaatcctgctgccttgggaactactatgttgcatctacagctcctgtccttgaaagaatcctctgcacatgggacttccatttgctccacaccattccggaccccatcccctccacggtccccggtggcctctgagtcctgtggccttgattccccagccaggcttatcttcctccatgtgggcctccacactactagcagatccacagcagggccagctgaagccacatgcctgccagccagcatcctgagaaggaggagatatcaggaaagcaagaggcttgacagagagagacaaatgggttgggggataaagtggagagtgagaaagaagccaggctgctcagagaaaagtcagggaacctttaatctctgtttcccattctagcccaccagggtccagacttgctttgtgtcctggcctggaataatctagaatttaggaattgcttttcttaaaccctcccttaacttaagggtggcttactgttccttgtaagctgaacagcccttcaaacagactacagcttatttgtctggatgcctggaagagggatctgggcaactagagccctacaaagcccaatggacaaaccccagtagatcctgggtatcatggactgcatgtgtgaggctcctactgaccgttccaaggcaggaactctgttcaggaagctatgagacagtcacttatctagtgaggaaatccagccaccatccagcagccactgctcaacaccaaatagttactcccagcccattgtggatatccctgtccttgcaaagtgatgtaacaaaagtcaccttccagcacaacaattgataggaagagaaatccaagctgtagcagcaggagaaagtatgtgctgaaacagtgcttgcaaatttcaggggccacaagaggacaggccacttatggggtcacagggccactgtgacagtagagcaggtgggcaggtcaaagattggtgagtgggagccctgttctgtctccagagggtgctcaatgtcatcctcctccaagaggcctccccacccacctgcctacccagtggctactactcatttaactgccaaatgaagtcatcttgaacacatgctggtctctttagtagctgtgtccccagcaggaatgagggcagggacctcatgtgttggatgcacacatacaaatgagagggagctgtggagcggtgcccctgacatttccccagcagcctgccctcaatgggcaccccagggagagtgtgcaggcatgaagggccccacccctggagctgaagctgcaggaagaggcccctcggtgtcctctcaggctcttactccagaggagtccggctccactacctgggaaggcttttaggagcctctcctaagcctgtgtggggagaattttgcttactaaaaaagtttacgtgtgagagggactttccaaagtttagaaaatgagcatgtgaaggtcatctgcttgaggctcagaggggaaaaatgtatcagggtcacactggaggttccggcagagccagagctgttgaaatcacccaaagctctgggcaggactgaacccattcctctgccctgtcctcgatttgtcctccaactctcagctgtggaattggaatattcaccaagctccggccctggcagtgagtgaggtttgcttggggcagggccctcaggtcctggtacccctagctcagtgcaggcacaggagactcactggctggaagcgggccagcccaggggcaccgggaatcctgcacagatggggctctgagggcctctgttccctggaccccagatctgagacaggagccctcatccagaatcatggagccagggcagggctcctgccctacatgcttgtggggagtgggcacggctctgcacctggtctcaccctctctggttatggatagcaccaggatagtcaatcaacagagttctaatgattgaaagaaaagcattaaactacagcctgaaggggctgagaggcaccaggctgattttcttagggtggttggtcctagagtctctgaaggctcatcattctacaagctcacacagtccatgtgaggagaagaggagggacaagcagctgggagcagatcaggacctcagtgatgaggatatcacaggcacatggaggtatgtgctggaagctgatgagacagatgaccctggagttcttgaaggacactgcacctgaccctagaagtgagctggaagggatggacatctccagataagggcgctgagcccccatagtgctgatgtgcaccagcacagattccagtatctgctgtgcctgcagtgggacaaggtgtcagggcacacctgctcccagaggctgggctgggaagaagttggctgagtctcgccaatatccctgagccctagaggctctggccagacaggtccataggcagacagggagcagaggcaatgagacacacgggtgcttctgcaagagtcatggctctggcatgagggagacctcttgagatgcagactcgaaggtctgtcttggcaggatttgtcacacctgtggggcaaagagctagaacaaggaaaggctgggagaggaaggggtcaccggacaggaaggcaactaatagagtttggctttgtccctacccaaaatctcatcttaaattataattcccaaaatccccacgtgacaagggagagaccaggtggaggtaagtgaatcatgggtgcattttcccctgtacagttttcatgatagtgagtgagttctaatgagacctgattattttataagtgtttgggcaagttccttctttggtcattctcctttctgccaccttgtgaagaaggtggcttgcttcccctttgccttccgccatgattttaggtttcctgaggccttccaagccatgtggaactgtgaattaattaaaactctttcctttacaaattacccagcctcgggtattttcttatagcaatgtgataaagtactaataaagcacattcctttgcatgaatgatacgcccacagtgggtcagagtcctgcaatctgttggctgaaagggcaggggctctgcaaagctgcagggaagcaaagccagctgagggttctcctatgttcctgtggttggttcagaccagcctatgtgagcaggtgtggggcattctgggtggttggactgtgcaactgcaggcatattagtgtgtgcacaaaggggagtatgtgagagtctcccaccatgcacctgtggtcctctgccccagagctaggcccctccctgcccctcagtgtccagtgaggggtcagatttcttttcccactgagtcctgttgtggttgctgactcttttcatgcctcctgattgagagaatcaaggtggagatcagggactaaggcaggacagtgaggggctcaagatcccccaggcccagccccctgctcagggtattccccctcttcctgaaagggaagcgaccaatacctaccccttccctctgctatagtctgacccacaggcctgtccattgcccccttacctcccccgtatctacccctgaaatgactcattgctctaggggcttttcctcctctgccctgggcccagagtaagagacatcagggaaggaaagggtacctgggagtcttgatctccagactcctggaccttctgatccacacattgagccttgacatcaccacccctaagaccctcaagatctcctaaaaagagagccttccatcctagggtttagggccacttgcagcagcaaggcattttcagaggccctggattgaggatagactctgcctcactcccattacatccagaacatgctatagacacatgaaaaagctccctcactgtccctaggaagccatgtgctcagctaaggagatgggctcaggaacatgatggtaactcaaggttctgccaacattacttgacatatgaaaatacagagttttctagcactgccatggccaagattttggttttggagacctccgagctaatcagcctaaagatcccttgcaggccctgagccccccaccttctggctgtaggccgatctgccagttccttctccaagaggtggtgtttgctgactatacccacacaaacaatgaagcgctcagtgtgacaggagctcagagacttaatggattctgatctctgggaaccaagaacacaaactgctccctgacccatagaggtgaggtgcacagaccatgcccagcacatcaggtatcctctacacttctggaggggccccactcacctgcatagctgtgtgtatcctgccagtgtctctcccaacttcactgtgctggccgggagcctcatgctggcactgcagaatggaagacaggacagacaagccatgtgagacatccccacctcaggaagaccaggtctgtccctagggctggaggagtagtccccagcaccaaagagaacatggtcctccatcacagagtggactatgttgacttggccaaagtgaagaacttccagactccaggaatttttctccattcctgagaaacatcccactcagtaggacatccccaggatcagaacatcttccactccttccttctccccttctcttccaacaactatcactttcacctcaaagacacctcctgagtcagatccttcctttccatcttccccaccaaagcaatcaacatctatctgctccccggcctgccacccagagctcttcaccaggctgcttatacctcaaataaatctgatctggtccttcccgctcagacccctcagactgcagaacaggggccaaactccttggcatatcacacaaggctctcattatctggtccctccccctgcctacacctcatgcctatgtgccagccgacagaacacccatgctcttcactgtgcccttccacattctgttccttctattggaaatgccattcctccagttttccacctgaaaacatcccactagttcttcaagttccatgttgaatgtcaattgcttcataataccttccccagctctcacaggctgagtggttgcagctactcctgagctcctagccctgggtttgaaattcctgtccctgcacctccctgctcgagtggtctgtgtgtgtttcatggtctcatgtgagttgcttgagggcagcaactctgccattcatcattgtactcatcctcttccatccccaccccaacccccaggcctagcccagcagtcagcttcagtgaatgtttagagggcagatgaatacagcacaagtggattaaattcctaacacatacgtgcaactccttttcagatctgatatttttttcccaaagcatgatcctcagactcctgcatcaatgttatggagcatggggacccttatcaatcccacagatccacaggcaccaggcctgctgaggtagaggctttccctccctacgctgttcctggtctccctcctgaaaagcctcctcctccttcccacctcaagactaaaccctcctccttctttggtgccccatccaagccctgcatcctccaagcagctctccctgatcctacttccctgttccatctaatccagctacagtctctcctgttaatcccatcccttgccagatctggagccctgggcaaggaatgcatgttccttttgtgtatcatagggtacagcctggcacaaaggacatgggtggcagatactcagaaaacaatctgaatatgaccaacaggaaagagctggggcctccagtccccctcgccccaacctgcagattaaagtggtttctcagttgtctttcctggggctcatctgaagggggcaggaaaagcggtggcttgtgagagtcctggggaggtcggtggccccctcaagtcaggacgcttcctcctccttggatatcctacagcttccaccaagcgtcaactgtgaccaaagaagtctgtggacaagccttcattaaagacccttgtcttgtctggtaaacgtatctgtgaaaccccatacaccagtcagggtcacaagcccttctctaggtttccttcttgggaagctgttaactacctgttttcctatctgcctatctgcctgccagccctgtggggcaccgatcaacatcgggccttcagcctcctccctagggcctggcacacattagagacgcaatgcccagtgaatgagtgagtgaccctgtgaaccaaataatgaagaataaacactaggacaaggcaatatgagatttccccacaccgcatactttgtactgttggagcagtggcctagcagagagcattaggagagccctgctgctctccacctctcccctctgctcctgtgcaagcctcctaagtgatgccagaaactgatgaaggcaggtgtgggcctcctgaagcccagtgccatcctggcctgtactgtcatctgcagctccgaccttgcccactacgtggggctgctaatgcttactggcacccagctcctgggtcactaacctactctcctttatttagcacagccttgtctgcttggggccacccatgggaacccaaagcctactctatccagagcatggtcctatctagtccgaggctcctatgctgtgatgggtgctggattcctcagtttaccttgcaatggattcaagacaagggtgtgctgtgctcttacctgaaaggaggtggtcctggcctggagtatttgagggagctactgcaggcgcatcgagtggatgagggggtctgcctcttcctccttgctggggttttttacccagacagggcagggggagcatcacacagaggtctagagcccagtgggctcaggcagccacagaccccatgtttcatcccaggagctgcaggagaaggggaaagtgagacagtcctctgcctctctctcctgcctccttcaccttctgtaagagtggttggtggataagcattcccttggggccaggtcaccaggcagagcttcctaggggagcttccggaatgatctgaggcttcccaagagtctgttggagccctggagtccaggcctggatgaggatgtggtagggggtaccaggtctccctgccccatggctggtgccccttgaagtctagcagcctgccccatctcagtccctgctctgaccatggctggaaggaggcagtggggaagagactgccaacaccaacctgccttagtggggtgggtgagagacagacagggagccagagaccacctgagtggaaataggaaggagccctccagggtggagggtggaagggtaggagggagaggacactgccaaccaggagtgtgactagtgagaggcaggagactacagtcagagggcccaaaatgccctgctctgcagaggacggcagtttcttccaagggagggccctttctgtctgcctctcagtggtggcttggcctcctccgagaggccggctgctcctgggcctgggctgctctgaggctgcagtcttctttggagccagcttgatgtcttgtcaggctcttctttaggactggtgacctctcgaagatcgatgctttctcagacaccagtctcctttctgagcctggtgtgttttctgagacacttgtcttttctagaaccgacctctctgagatggacttttgctttatcaccactatcttctcctacactgatgcctttcctggggccagtgtcttctctgagacacctgtctttactggaaccagcttcttctctgagctgtcttttctctgataccactgtcttctcagatagagatgttttctccaaggctagcaccttcttggcgatggaggttttttctgagaccagtctctcatccagtgctgtcttccctagcatggagtatttctctgagaagactggggacttctctgttttttttcctccctcatggctccctgctcaccaagctctcctcctccagggcccagggaccccgctgctcctggctttgtctctggtgaggtggggtctccagttccttcttggggactaggagatgctgcacgtcctgctagggtcccagcttcccctttgctcctctgccttctgcctctcccagatgggtgcccatgcagccttcaccacctgctacctctgccccttctgacagattatgatagcttggatgtcctcctcctcatctttggaggctggggcagcagcttggaaacctctacttcttccatgcttgagagtctgagtagggaggtggagttggaaatataatcacaggatatcagaaatggaagggaccttgggggcacctaaccaatggagatgccttcaggaccaccatggggaatacaagaatgtcaggccctgccctcctccccaccaccacttaaataaggattatctttacctactctacatattaggcttccaaggggtcattgaacaaagcaagccatgcttttttaaaaagttaataaacccctagtaaggtccaactattccatgtttagacatagtcaaaaaaaattaagcaactatattatatgtgccagaccctgtgctaggcattgagggtcaaaagaaataagcacagcttctgttccttagaacttagatcaaaactagaagtattcagggatttgtcaaaggtctcacagctaattgacaggagagcttggagtgaaagcgagggcttctgatgcaccattccactttcctgtcagtcacatgggtacagttgagaccaagtgatagccacaggtattgctgcggcctagggcacatgccctgttctccatcctctggggcacccagggaaacaacagcatgagaagactgtcaaaaacccacagcactcggcctccagagaaaggagattcttttccttcctcaactacctcttctccatgtgatttcaggcaggttaactcactttcaaagcctcggttttcaaatctgcaaacaaggcttgcaaggaagtaaaaggagactcatctcatgagagtgcccagcacagtcctggcatgtgagtggcattcagtaaattctgggcccttctcttcctttcctcataatctcaaagtctagatggcaaaaccagttctaatgttcctcccctcagaagtgaattatgggggtcaggattagagggaggcaggctggctaacaggaagaggtgagccccagagctggacagatctggatacaaactctggtcctgctgctctgtaggcatatgattccctcagtatccttcagcccagtttccctttctgtaaaatgggttcacaatacctccctctcaggaatattgtgagaactaagtgagctatggccataaaatgtcccacacagttttggctcatggatgatctcaatactggcaatcattgttgtgaagagggtggaacctagcaggtctgaggggtctggagaaggtgaggaatttgaaatttatcttcacaaccttcagcttcattctctgggcttcagtgcttggccggctgaacacgctgcacgaaatctggagaagctaattcatccccaccacccaggataccacaatggtaccctggcccctgccttgacctgagcacttctcagaggcccgacgttctccatctggctgatcctgggagcctcgtcctctgtggtttagctctggctgcagtggcaccatctgagcttctgctcctccttatcttccaaagaccactactaggaaaggctcagggaggggaggagagggtcagcacagcacggagaaacataagaccctccccattgcatattcctgtggggctgaaagaagagaccacataccctcctgcctgcattgaacacaagaggctgtcaagtgcttgaaatgcagctggtctgaacagagacatactgtgtgaaatacacactggattttaaaaaccagttaaaactctcattaggaattgtgtatactaattacatggtgaaatggtaatatttttgatatattggggtaaatgagctatcgtattaacataattttactttttacttttttaatgtgaccactcaaaattttaacattttaaatgtagttcccattatatgtctattaaatttctactaaagctgtagggatttgatttaaaccagggtttctccacctcggcaccactgacactttgaccagataattccgtgtgtgagtctgtcctggattgtaggatgtttagcagcaaacttagccaatacctgctgggtgccagtagtagcatcccccagctgtgacaatgaaaatgctttctgacattgctgaatgtcgctggggggcaaaatcacctcagatgagaatccctgggctggacattactctggacttcagggtgggaatgtgaggcctccctgcctgagggtgactaggaatgtggaagggtgggcatggttatgcctgaaggaagtagatgagcttgccaagtgcctctctctttttagtcctgggattcttagataatactccttgacagacagtcagggtgagatttcctcagagttactcagttccccatggaatttcttagctttggggatggggagacttgcaaataaaaccaattacacctgaaaaccccgatatcatctcctctttgcttcccaggggctcttggggtctctgtcaccttctagttgaaaagagctgagtcagagagcttgacagatggtgatgaaaatccagaaaactttcacttgtctggggagcaaagggagcccacacaccatacttttggctcctgccccaatgacccttcattcacgtggccatccaggtactctcgcagccagccagtcaagccccaccaatttatccatctaccactcactcacacatctgtgtacccagccacccacccatttccatcatccttgtcccaccttccctaccacacactcacccactgccccccagcccatcctcccttccaaccaccacatctcttccaatccaacaaaggagcaaatgcatacttactgagcaactgtgacaagccagcaccatttcagcaactgcggtggagtggggaggggggtcagagaacatagcagggtatctgccctggagacactaacaacctagtaagaaacagaagaacgtccaccaagaaacagaagaatgttcaccaataactcccccaaccaaagtgcacaagtcactctgcagagtgagaacacaaatgctacaagccaagattatccggagaggctcaaggaagagactgaacctaggctggatctcagtgagcaaccaggcttcggatgtggtgactggcagtccaggcaaaggagaagtactgagcaccccaggaggccagaagtttcggggtttgctggggacaaaaaggctgtaattcccaagggaggcaggagagggcttgagcaggggagtagcagactgagagagtcagtcaggtgagcccctcctggcacctccctctgtctcccccatgcttagacctgggttggaaaaagcctccgtcttcccttccagagttacagcaatgactataaggcctgcccttgccactcctgggcaccaaactctcccttctttttgctctccagcctcccttgctgcccacctctagttcctactgagcctcttccctcctggatggtataaaacagtgccacatggagtcttaggtaagacagagtcaggtgatctggtttctagtcctcctgcacttgggtaagtcatttccttttctctttttccattttccctcctaaaatgagaaggttcaaccacaagacagctctcatttttttctaggtccagcatcacatgtattgagccaatattcactaaacgaatacttctgagcatctactatgtgccaggcatgcttccagggactaaaaccaagatcctccccttcatggagcacagatccagagtggaggagagtcagaccatgagtgaggaaaacaagctcatgaacaaaatgagataagtgtcactgggacaacagaacaaagtaagcaatgtgggagagggtggctgggtgatgaaaccctctgagagatcaggttcatgaggaggaggcagagctagatctggcagccagagtcccaggaggagggcacagcgagtgcagagcctggatgtgaggaggtaggtatctaagggaagagggtacgcgtgggccaaggagtagccttaagggaagttggacaaggtgccagggttagagcatggggtcttggagaccaaggaaggaacttgggttttaatcaaagtgtgctggacagccctggagagttgtacacagagaagtgacagggtgggatttctgtagtttaaatctctctggctgatgtgtggaaaaagaatggaaagggcaggggaaaggggaaacaggagacctgttgggaggcacctgcaattgcacaggtaagaactatcatgacttgaactgacagagagatatgggaaagggatggattcggggcacattctgaagatagagccaccaggtttactactatattggatgttggacttgggggaggcgcgtggttggtgaggaaagaataattaagaacaagatttttggcctgagctattcctggagctaccatgagcaggacaggaagaccaggggagcaaggagtgtgggggatgttgggtggtagaggggagggacaggagggaaatgaagacctgtgtttctggtagtgaaaagcaaaggagatcaagatgctgcagtcaggaagctggaaaaataccaagccagggcgttggcatgggcaaaggagcgagggcctcagtcaaatgctgctgtgagggagaatgagaccaggtggagtaatgagtacaggggtgccaggcttcctggaagcggcagcttcagtgattgtgccagagcctgacccagctggtgaggatgaatgggaacgaagaaagaaattagtgattagcagcactcttttgagaaatattactgagaagaaaagcaaatagaaggggacagtaagtacccagaagaggatgtgaggtcacaggatgctttttttaagttgaggtataatttatataaatgtacagatcttaagttttgcttttcttagaaaaaatgagcaaatgcaggagagtagagagggcctgaaaagaaagggtgattaagttgtcctgcagtgagggaaacaactgcaggatagggcctctttcttctctagtacccagcatggcacctggcacccaacaagtgcagaccaatgtagaagagcaaggcaatgtcaatttcaggagtgcagggctctcctcctccctaggaactattcaacctctgccttgatactgaagagcacaaagcaggagaaaactctatgtctttcccaaaggcaatctgtctgtctctctttccgggaaggtgtgtgcctgccaatcactctataggaaaggatgtacctttgaagaggaactttctggaccctcttaattctgccatcagtgcagctcttccaggttagaacctcagtccctctgtcagtcttacctccacttcctcatgcagaagggccccagtcaaatgtttctccccatggccttcatcatggaatttaagcgaggttcccctgggcctccacatgactcctgtgagctctgtagaatgatcattcatcgttcattcactgcataccaactgatggtctcttatgaggtaggattcaacgtcgcacctctccttggttttcttgttcaaagttagaaatgccaacttctgctgtctttcatctgataccacatctccagcccccacacccctgcttctctggatgcacccctgccccttgcccatagtctaggaacagctcttgccctccaaagctgagggattcatatactggggaaagtgacccacacagctcaaagcacctcttccctgagctggctgggctggagcctccaggacccctgaatcctgagcaatccagtttccacatactgccctcagcccttggggaagtggtctatttgtttaccctccagtgaagccttttatggtgtctgatcagagcctggtctccttggaattgactcattccccaggctggttctggtcctgagaggtctccagggggctgggctatagaagatggggcccaggcatctttgaatgtccctgagctttacaccaagagcccacagctcactcaaggtgatgtggctaccactcctgctgcttgggaatcatgtggccaccttcaacccctgacattggcaaaacctgagtcccttgagaatcaccatccaaccctgggaagaaaagctatctccaataagcaaaagttatgaggaaattgatagaaatggaaggcaaaggtcagtccccaggagggaccacagcaggtgcaggtgttgagacccctatgagaataaattaataattaggggcttagaacagtgcctggcatttgttgaatgtggagaataataatcagtaactaaaggaataaaggaggaagaaaggacactcacatgtgtgcttactccaatgagaggcactgctgtaatgtcactgacattcctctttacaacagccctgggaggtaagtgtgtgttatccccattttgattataactttcccaagattacgcagctagtaaaaataggaaaccaggccagatgcagtggcttacgtctgtaatcccagtacttcggaaggccagggcaggtggatcacctgaggtcaggggtgtgagaccagcctggccaacatggtgaaactccatctctactaaaaatacaaaaattagccaggcatagtggtaagtgcctgtaatgccagctactctggaggctgaagcaggagaattactggaacccaggaggcagaggttgcagtgagccaagatggcaccactgcactccagcctgggcgacagaacgagagtctgtctcaaaaaaaaaaaaaaaaaaaaaggaaaccaagattttaatctagattagcatctcaagtgcccatacccttaaccactttactactgccagaaaaggctgctgaggaagcctggccctaaaccagagtgaggttccacctccttgggagctcaacagctgagcattcaggagaaggaacagaggggcctctgaggtgtgggctttcccaccccggggcaggctgcagctcagggcacagcctgggagggcagagttttggggaaacccagtggccagtacaacattgaccgtcaaggccagagccaggcctggggtgaaacctaaaggccccaacaactgggggtcccagccactctccctagctgagggcacagccccaggtggctgcccaccactgcttccctccgaacaatgctttccccctgtgctggccttcaccaggggacacatttccctccttatgcctgcatgtcatactgctatcctccctattccagacttcaccaactccaaaatggggctccactttttctcttaaatatttctaaaagacatctgccccgttactcattggagagcttgttttgacctctccttttggaattttcttcctaaagtttaacttccatctattatgtagcaactgatagcaagggtttaagtgcagtggttagtaaaggtcatgtttacaagtaaaacccattttcccaaactgaattataggtagatgcttcttatacaacagatcaaggctcggatgctctggttaaagtagggagagggtgtgaaggctgccccagaagcattttctagaaccctggggctcaaggagcataatttgcaattcttaggggctaggatagagaaagggagaacagaggagaaagctgcagtgggggctggccatgatcttggacctaccttcattccctaagcggggtaggccttaggttccccttcaacataaagggtcactgtgggtggtcactgaggtcatttccagccctgatggttttgggcaaagtgttgggagtccccagggcagtgcatggaggtgggaaggcagctcaagcccctgggaaatgattaaccactggctactcagtcccaggtgctctcagatccacctctcacctcctgcagacaggccagtccagggagaaaagatcaaggcctctgaccagggcacccagccagcccactcaccactgcccctatcccaggactggaacactcaatttactacttaatgccaagaatatgctgcaggctggccctcagctgcccaccaacctccccatctaaggcctccctgactaaggccatgcttgtcacactctcagcacattcctcccaaccctggcaggctcagttgacagtgaccttctctcctgcctccccactgaggcttgttgttcacttagggagtgaagcagaagtgctcctctgttccaggtgcctcatcagggtgactgttggcagcagctgctcctgcccatggggctatatgagagctaaggctgggcagaggtgacagaccaggggcccctgtggctgaattggtttcccagggcttccctggcacttaccctggacatcctgtgggaacttggccccacccatgcacccacatgagtccatgttcatcagagcaatggacaagctaaggccagactttgctcccatttccagtgctagctgcctccccacaccacacacccctgtacatatgcaggtgtgcttacagacataaaatgatatatatcccaccagactgtgaacttctgagaaagtagtgtctggtttccttctcaccagagactgtttctgagaaagaagggtccttggcctactgcaggcccagaaacctccttcccactggactgcatgagggcccattctccatttctgatcaagggcttggattctcatgtagaagtttattatcattcaaattctaattctatcttgcagatagaattagaagccaggggatgaccttggaaaatacagtctatttcgtccaattgttcttgcctgtctactccatgtaataatgaagaatttgctcctttaggctctagcgctgacaaggggctattgtccatgggagtgagattagtctgctagaacacaaaagccacacacataaagggctgctttcagccccaagaagaggcacccaggccagtgccaaagcgagagagggaggggcagggaggctcctgaccagattctgctcatgggggaattttggccagagctgagcaatacatctctaccaggtcacaccacaaaacacggcctgtgtcaagacaatacacctatctgtgcttcagttttcttatataaaattgggtggtgatgatacctactcttgctcatctggtggaattataatcagtaacaaacaagtaatataatgtatgtgaaacctcattcattcattgatttttttttttttctttgaaacatggtcttgctctgtggcccaggctggagttcagcagtgtggtcaccactcactgcagcctcaacttcctgagctcaatcaattctcccacttcagcctcccaagtagttgagaccacaggttagccatgcctggctaacttttactttgtttttttgtagagatggggttttgccatattgcccaggctggtctcaaactcctgggctcaagcaatctgcctgccctggcctcccaaattctgggattacaggcctgagccattgcacttagcctattcattgattttcttttttaaaatttttcatttgtttttattatattttaccattcattaatttttaataaacatttacaatatctgatattcataggcatcagacatgtgacaaacatcattctaggtgaggcagctaatgtaatgaacaagatccagtctgaatgtccaaggaacaaagcaaaatttgcactaaccataaaaaacagcaatgacggcggtgaggatggtggtggtgatgatggtaatgatagatgttcaccccagaaggctctgatgcctggtgactgatttttgtgtgtggtgattgttcctcctcttgttcatcttggctatgaactaagagagattaaaatgcttttgtacaaaggaaaaagtatgcatattctatgaaatacatttctctgcctgtttaaatgtagcattttcaagagaggcagggatattcagtgttcaccacttgggtgaatggatgggttttcagcatcaggcctgggaggccctgaccagtcatgtcgttgatctcaggcctgtgggggtaagtgtgtgcaggagggttaggatgtggcatgtggccagggagctttctttcctccctgggcctcagtgtgtccacttgcaaagttaaaatgtctactttcccattgcttaagctttctcaagctaatttaccacaaatcaatctgctgagattcaccaagatgataatggtttaccagagaacaaagagaaatgttatatatatatatcttagatatagattatatatgttatatatctgtacacatacatggtttttttttttttgtattttttttttctgtagcagcagtcttactatgctgactgggctggtctcaaacttctggcctcaagcaatcctccttcccgagttcccccaaattctggggttacatgaatgagccactgtgcctggctacgcttcatgcttttgaatactttttgattgaaataagacagaaatacccatgagctagtattacacagcaggcttctaatggataaagacaacaaacaccccctactactgagtgttctgctgtggcttttaatagtatttacaggataactaagtgaaacatgaagaaaaacagaaaaagaagcggtgcttgtataaagttcttgtatagaaagagaataaggagaaaaaactatcaaaaatacggaatatatagcagacctgttttctgaagatagtacctgtatttctatagtggtgggaggatggagtgcagaagagaggtggtaggagaatgagatttgctacagtacacatccatattgagggtatcatggcaagttcctgttccctatgccacagtggtacagttgacaaattcttcaatagaatgcactctcaaacatcaactttataaattatctgaaaatataaaattataaaagaaaaaaaatcccaaagcatttatttcaaagacaggctaaataaaatttgctaatgacttacttcaaatcttgcatagcaatgagtaactttctttccttagatattcatcctctttaagctaggatttagattaccataactatattttatgattaactgaatagcttcattagcaatttcttcatcaggtaatttcatggttattttccaaatgaaatctattcccatcaacttcagcttttctacattctgttcaaaagaaaaaaacaaattatatagcacaccaggatcacaaaattacagatcattatttcctgttacatcttgagtccacaacacttcagttcaacatgaatcaaggcttcaggacctcagctatatgaaaacactgtcatactgatatggaacttgaaaacaaaaacccaccaaccacagaagcaccagcaacctctgtgggagctagagtaagtatggagagttttcttcatatgtccctaaacccaaagcagacatacacatcgacaggctattgaagcagacacacaggaggaataagctgggcccaatcttcataacttttcttcaaatggaaatggactcaggctagaagtggctactaattcttggggttcaagctagtttctccagagctctgttagaaataccaggatgggccaggcgtgttggggctcatgcctttgatcccagtactttgggaggctgaggctaggagttcaagacaagcctaagcaacagagcgacacccatctctacaaaaataaataaataaaaacaaataacaggatacaggctttacaagagcttgtaaaaatttttaccacccaaagaagccagatacttaataaaagggacttgaaagccagctctcactttggtccaaggtggccagaaaatggggggcccccggggaaagggccgcagacacctgtgggccggctccgtgggtgtccttgaacttggatggtggtcccgcagctctgggcgccacgcagactgctgtgcccactggggctgggctcaccaggaagtaggatcagcagaaacgcgggcgctcacaactggtgccaggttcggtttccttaggcctctacccgcagggccccgtccctaccgtgcctggtgggtgcttcctcacctgctgctctccccacaacggggctgctcttttgcccaggggctctggggcggtcccggccacccagagcgcgaggtcgcaggtcccagtactcatgccggaggccctgacgtgctgggggtgcccacgcgggcctgtggtccccacgccggcttgtggtccccacgcctggctcgggcacctgcagagggagggcgccctcttgagtcggcgccctctgccgcgctgttgccgcccccgcggctggaggtcagctcctctccccggccatctaggcctcagctctgccctgccccctggccgctccgctatcctaccccctggccaccaccagaggaagaccccttctttccctagctgtgcccgcacagtgaggccctacccgcgggccgcctcctcccgctgctgccccagcgctgtcctacccccggtcgcgtcgccgaggcagccgccacaggtcggtgctaccttctgggcaccgaaggagggaactctcctttccccagccattccgccccactgtcctgccctacccaatggccgcctacctctgactgccctacccctggtctgcctgcctccactaccgcccgccggctgcctgctgccccagccccctccaccgtggcagccgctgccaccgcccaggtagtgcaacatcccgcagcggtctccttagcgcccgcaagttccggcctccaaggaggacgctggcgggtggcctcggcgccggcttctcctctggcagagcacaaaacagccctgggcaaaaaccacaggcaactcaaacgctggaccaggccctcagcaggcttttataccagctttatgcaaataaagtctcctggaacacgtgttctgattgaatgagagcaagtctataggacaactctgattggataatttagtccaatgagattaggtcaaaagcttccttctcatcaatcagaacatgtgtcctaggagcctgcacttgcagaaggtgggtatatagctgttgaggtgggtcagtcttctcgtttgactctcttctggttctgtgtgctgtgctgtcctgttctggcaaaaggaggacgagctggcctacctgctgggcggctttattggagactggagtctgcggatggctgcagtgagatggcagccgctaggagggggacctatggcaacaggaggttggttggtgggcggatggcacgggaggtagcatcgctctgctggtggtggcctagcttcagcgtcagcggtaccggtgcgaccaggttaccaggggatgagggatgtgactttggagttggaggctggggggatagaacactgctggggaataaaacactgctggggggatacaacactgctggggccgggggaggagggtggcacagtgttgcagcaggtagcggggccagggaaaatagggttcatatttccggttgtgacccagccaggcgtgggggacagcatgcccatgcagatagcctgggaacgtcaggattcctgccgtgggttcccaggtttgcatccttgcagtttgtgtggccaggactgcctaggagccactgggcagggagcagccccattatgggagagcagcaggcaaggaagaacctagggggcacaggagggttgggccctgtaggtagctgcatcaggaaccaggaactcgcacctgcatgaaaaggggccaccaggtgtgaatggcactgagggactggttcccagtttctgctgctcctaattccaccacatcgtagctccagtggtcgtagtttgcgtgatgccccgaggctcaggacctccacccaagtgcggaaccaccgccgggagccagggactgtgctgtccgcagccctcacccccggggccccagtttctgcaaagagaggctgcactttggagggtgggtgggtgtgagtccgtcagctgaaacctggccccttatcccaagtggccagcataacacggtgacacaacttagtgtcaccactctcctcaccctactcttgagtcagatggtctgaggggcctggtggagtgtgttcaaccgcaggaaggggcagatgtgagatggtggtggggcaacagacccaagtcggtagtcaaggtctggggggatgtggagggtcttctagcagaagtggaagggccatggggctatggggtcaggagaggggtgggtaagccaggcccactctacacaagcaccatagtcctccagccaagctggccccagcacgccgggtgccatcctacccctatgtgtgttgttaggcaccaggcggcctggcacagagcaggagcctgcctcctggggaaatccagctcccatccacagcctggcagctgcacgcacagaggccattgcccagggagcaagtgggtttgggggagggtggtcggcccagccagaaagagaaagagctgggagtagagccacctctggctgggctttaagttggggtctttccagacctccagggctccaggctgccagctgcctgctgaggttctgggtttcctccttagccttcagtttcctcacctgaccagggggacctatatggcagtgtttagattattagacttgttactttgggaaaccctcagcctactggctctctaaatttttttttcctgactttaaggatcttttcaatggattatctagagatggggaggcaggaaggctgggatactttctcttggcttaacagtcccttcagggcattccactccttttaggatcttttaaagcacgtgcctagcaactcatcctgtacctgagagagctgggaagaacttcatgcatgtccagtactagaatgatgtgttccctgaccctgggccctcatctcaccccaaaacctaaatccctcggagcaaccagcttcagacacaagtctgaatttgttgcctgttgtctgagattgacccaaggtcttctcctcatatgagatggggatcccaggccccctgtatttaggatccaaccaccagccacccttgtgggcccacctgggcctcttcactccacttgtgtaggaaagccaaatgtccagacctggtgtcctatttgtatctctctttttctcagtgtatgtttgctataatggcaatgatacagcatttccatataagtttcgggatatggaatgttccccaccccagaaagtccctacatcagcaagccctgattccaccccctttgggctggctgtgcatgtgctcagcttgatgaaaacaaaaatggcctatgcagtctacactgctgagtgtgatctgtggacatagcttcctgatcctgcatctccttccccctcattactgaggtctattctgtctctcacttttcacctgaactgctcctgaagccaagatgaggaatggggagggtcttctcctggggtaaatctttgctctgaaaagcctgggcttgccccactctgttatcccctcctttgagctccatttctgccagaggttggcaagatgcagcctatccctgtttggtcttgtgcctcctataagccaagaaatagctttttattttcgaatggtagaattcatcaaaagaataataatacttaaggacattttgaaattttccatgtccagaagaaaacttttgtggaggtgcagtcatgcctgttcttttacagggtgtctgcagaaggctgctgtcctgctacagtggcagagttgagtctttgggacagacaccagtgggaaaacctgaaaatactgacccaaggccctttagggactgtttttagttcttgatttgagagttacatagtgggactggaggctttgcaccaaatcttttatcactcccactgctgtagtctctgctggtgtgtctgtaaagttagggtaccatggcacctcccttgagagtattgagctccagtgtgctagttttgggggtgcctgcttcatggttgcttatcccacctacagaggtcctgggcctaaaccaggccagcaggatgagttggtcattggaggctggagcctgcaggtggcagaggcactatggaagctggtgttgctgtagtctgtggctctgggggtggtggctcctgctccctggacacccaggatgtatctttctgaatttggaaaccttccttaaactgccagcctcaggacccagcctgataatccccaacaatcacatgtaagtgtgcatttgatacatgtagtgtatttgcagagttatggaactataggcacagtataattgaagtgcatttcattcatccccaaaaggtgatgctgtttgtggccagtccctattaccttctagcactagaccactatacatctcccctctgtctccagagatttgccttttctggacatgccttgccagtggaatcacagaatggggtcatttgctgctgctttctttctgtcagcttaatgtgtttgagttccattccttttgtaatgtgtattattactttattttgattgacaaaaaatataataaagatataccacccatgtttttcctttcattccttgagatgtattcaggtagttttcatcatgaatagtgctgcagtgaatcttgttgtgcacgtagactttcatagcttataggcgcataactgggagtggaattgctgggtcaaaacaatagttccttcttaaacattttgagaaattgcctcattgtgttttaactggctgcactattttacactcccaccagcaatgtgaggttttcctatttttctcattcatgacaacactttttgttgttgttggattacaaggtgtaaagtggtatctctctgaggttttgattataatttccctaatggactaatattgaatatatttatacatactatttaaaatttgtatatattttggcaacggtaaaaatttctattaaaatctcatttttaaaattgtatttttgtctctttatagtttgtattcttaagtttaaagttacagttttaaaaaaattacagtttaaaaaagtcttaaaaaacattttagtttaaagttacagttttaaaaaaagttacagtttaaaaaaaaatgtccttccctatgtgttttttggggggttgtattttgaatagtattgtttctttaattatattttgagaatattggtagtgcacagaaatgcaattgatatttctatcttgatctcgatcgtctgcaatattgctaaacttattactttgagtgagtttttactaaatttctcaggattattgttattattattattattattattgagacagtatatcagtctgttgcccaggctggagtacagtagcacgaacacggttgactgctcccacctcagcctccagagtagcgggttctacaggcatattgccaccctgcccaactaatttttgtttattttttgtaggaatgagagttcactatgttgcccaggctggtctcaaactcttggattcaagtgattcccccactttagcctcccaaagttcaggggttacaggcatgaaccactgtgcctggctaggacttcatacatatgagattatgttttggatatgaaaaggcaattttacactttcctttggaatctggagtccttttcttcatttgttctttcatgtttttttttttatgatactttaagttccgggatacatgtgcagaacatgcaggtttgttacataggtatacacgtgccatggtggtttgctgcacccatcaacccgtcatctacattaggtatttctcctaatgctatccctcccctatccccccaactccccaacaggccctggtgtgtgatgttcccctccttgtgattttttttaacaatgtcatcaaggacaatgttgaatagaagtggcaaaagcgaatatttgtgcatcttgttcccggtcttatgtggaaaacattctttccactaagtatgacgttttctgtaggttttctatagataacctttatcaggttgtggaaattctcttcaattattgatttggttaaaattttcgttatatgctaggtatagtgaattttttttctgtgtcaatccgataaccatctcttggtcttccatcacttttacaatatggtatattacattaattgttttagccgctttattgagatacaattgatgtacagaaaactgaatgtttattatattcaatatgttaggtgtggacaaacacttgtgatatagaaccacaatcaagataataaatatatctatgttaattgtaatgaccacagggcccacacatccagggacttgagaaatcatttagaagaatggatatgaatggaaacatcaagtttttttagttgccacataaactgcatatctgtgccacaattcctcttggtgtaagggtccttaattctttttaaatgttgttgggtttgttttgctagtattgagaacttattttgtcaaattcaacaggggtagtgttctgcagtttttttcttttctcctgtggtttttgtattatagtaattctggcctagcataattaattgggaagtttttccttctcctttttttcatatttgtaaaggattggttgtaattgttcatcaaaaattggcaaaatacacatcactgatgcaattgagattgggcatattcttggcatgaagatttttattatttttattttagattcagggaaaacatatgcttgtttgttacaagggtatgtggcacgatgctgaggtttgggctttgactgaatgcatcacatatgcagtgaacatcatacccaataggtactttttcaacccttgtctccttcctctccccaccttttggagtctccattgtcttttgattcccatcattaattccatgaggacccaatgtttagctcccacgtataagtgagcacatgtggtatttgtttttctttttctctgttaatttgcttgggggaaaaggccaaattgtggcaatttgcatgcatctagctctgctatacataattaacaccagagccctcaatattttttcttttgcaaagatggggattggatcaaatatatccaatggatgtttttaagcagtttaaatacagagcctgttagatcacttgctcattttgctaaaatatatttggggagagagaaggagcctttgaggattttaggctatggatggccccacattctcatctaaattgtcatgggaccattggctaaaattaaagcattttacccaagaaaattcttactctcctcccaagagaatatttgatttgcatctgctacagaattttcttttatccttgattatcatttcgggttttctgggtcctttagggctgttttaagctttgtgtggactgatagacaagatgtaatttaactcttagagaatcaacctatagcaaatttcagaggacaattcatgtgatcccttgattccattcctacccagtgcctgcccctgtgtgggaaagatttccaaagattcatcaaggaataatatataactttcttttgaattattttgcctgggttttttgagcttgaatcttcaaaaagaaattatttatataatgtatattatttagatactttgtagctgcaatttggcatgcaaaactatttttaagaggtataattttctaagtatattaaatagaaaatattcatttctagatacagcatttgtgcatgttaaaagctgtttactgaagaaaataaaattcataattctgtttatatggggtacctagaatgggcaaattcatagaggtaaaaacagaatagaatttactggaggtaaaagcaagagttgtttagtgagtacagaatttctgttggggaagacaaaaaagtttggggtttaggtagtggtgataggtacatagcattgtaattgcatttaatgccactggattgtacacttacaaatggttaagatgataaatatggcatgtatatatacaatgaaaacctgtaacttctaagaagatatatatatacacacatatattatacatacatacatgtatacatatacatgtgtacatgcatccataggcttcagattaaatttgcctcttctccctaatttattatagaatgccaagttaggtagggaaggaaaagtagattaatttggtcctgggaatttttttgtttttgaattttatttggcttaccactgagagtagaaactcaatttgaatgtgtgtgccactcttctttataattcagaaaatatttcactattttgtttatttgctataagggcaaggactctatgatttttttcattatggtacaaggatatttttaggactgaatagttatcagatgcagaggaaggtaatcttgaagctcaattcccaaattaaagtgttttgtatacaatttcttacatttttgcagtgttgaccttagggaattttctaagctcacctatttgatttcactgaaccataatataatgtgcagtttcttttcttgtaggccaagaagtggccacgtgaacagttgggatttgtttccataaaattcctctctagtcaaacaaacaggtcatagaataaactaaaaataaatttgtggaagtcagcattcatttatgactaacaaagaagagaaaaattccatgagaaatagcaagtgcagagctgcttccttaataaaaatctaccaatctatttcaaatttaaacccagccattaattaaaagggacacataaaatacattggcattaaaataacctcagaaaaaggaaacctgttatcacccctctctttgaacatcattcttgaagtgctagcccatgcagacaggggagaactgaataactgtgtatataagaaagaaaatgaaaaacttgtcatttttggatgatataattgtccactatggaagcccagaagagtcaacagcaacttagtactagtaagaggttggttacaattggaaattcatttataaaagtcaggtagataggcatgtcttctacctgcgggtctgggaatatatcagtgagggaggtggaacacaggttctagctgggtcttgggaaagtgaggaggaagcacgtggacaaggcagggctccagaggcaccagagggctcatggcttctctttgttctcgccaccactttcactggggcccaggagctgagttccaagacttggggaatagtggacttctggggcaaagtggctgatgcaccaaaacatcttttaaagaacagataaagaacagaagcgtacctgggagagctggctgaaaccaggacacggtgggaccattggaaaggactctaaaccacagcagcagaaggagagctagacttgcagggacccaggctccacactagggacctcgaccttgtcctgcagggagtggagacccatgaatggatgttaggtgggtttggtttgcacatagccttggtgtatgttgatagtgttgtaactgatgactaaccaggcctcacatttgcagcccacagtgccttgcatacaggagatcatcattcttctggtcctatgccatgtgattgttactgaggaggatggagatgacatcatctaccacgcctcctccccaggtgagggctgtggtgagatgcatcctgccagaccctcctcaggagacaagggtattggcagttattcgtgaatgatgcaatggtgccacctctgccacagactcagctgtctgcccctgccctcataccatgaccaggctgtgactacaggtgttagagctgtagagaactgggactgtgctctcccgactctcctaacgctgacaacagagggaggacccaggctgtcttgcatttcccagcagtggctattgggctaagtaagtctctgaagagagagcagggcaagcttctgtcatcccctagcccccaggagttttccaactgctgtggaagctgtgtatgaagcactctccccactttgtgtggctctggcagtcccacagcacacgactaaacatggccttgctcagaggtgacatttggtcagaaagttgtgggaatactacttaggttaattagagagaacttgcccgtgaaagtagcaggaatgtaaatcactttcctggtgaattagctctaggtccatgtgctcccatttaacagaagcgcttatttcaggaccatggtggtaggaagagtgagtgctgctataccctgagtccttactactgtgcagataatgccaggcctctttaactagagtgagttttgctaatttgaaaaatgacagtaaacagaattttaccattatgagtgattgtcaatgtttcaccaactctttattgacagatgaagctgctttggtggaaggtgctaaaaagctgggctttgtacagtgagaacaccatattcggtcatcatagaagcagtaagtggcaaacttgtgcacattttagaacagctactttcttgaagattgtgtattggacatagcatgtctattgcaagaatgatagctaaatgtttatttttctatctgtgaaaaaacagaactgttgaaaagttgttaatgtaattatattattagtgttatttgcattacaatacttgtttgctctttaagatgcttccccacacatctttttacattggtgtgaaaatattagtagcaaaaaacttcaaaagtctagttttcattctacaatagttggaaaattaattttttgttgcacataagggcatattctatgcctcttgtagcctcagcacctaagatttcttacacagtgaagcctcacagtcctctgggcttctgtctggctggctgagagagaaggggtcaaagcttaatatccctaatctatataggagggttcttcttcactaaagtaaagggaggtcatgtattttctgattttttttttttatttttgctccctatggttcagaggaagaaatttagtgatagaaaaaaggttatatcaagaataagatcaaatagggacccttgagatgggcaacagggtaaaatgatgatgaggacaagcagggcaggggagtttgtcatgatgaccagttagaagggctatagtgcattcgaagttcacttccaaggggtatattagcgtgatattgtttctgactgtttagtactgtagtcagtttttgcctttgcttctatgcaaaacctgtgaaatatcagaccttgtacaaattgcttatttcttagcatctgcagtttcctttcttatggagtacaaagatcagattatgtttatttttattgtaaccaacagagggaatttagcttagggaagtgtgcaaaaatagaacaaagtactgattgagtatagtatttcctttacagaagctttttaaaaatgaggcctttccctcttgcgtttgaggaggcttctaaccttaactggagaactttcaatcgcatgggtgcttgggtgctgcaacatttatctgcattgcaaaaatggaggttgggggtagtgggcagggactagtcaatcagaagtgggagagacagacaagaacagctgcttctgtctcactcacatgccaaagaaagacgagcatctacagagcctgttgataccatcctcttagtgttagatgccagactggtaccactttgttatttcattgaagttttttggtcatatttctgggagtaaaaaagaataccctattcattaggacttgcaaataatcataataaatataatcctattaaaccattaatactggggtgacgtggaaccacagattgtcaaattagataccaggtatttaccaggtattatgatgaccttgctggtcatcataagagctgagtccatgggtgcacgtggaggtggttgatgtaaccatcgtaccgagagatgtggctcctgggaatggaagccctgctgctagacagtggatattataacattcctcagcctgaggagaaagggaactggtggatccagagagagctgaataaagatgggtgaaggctggatgaagtagattattagttgtattttaggatgtagtgaggagtaaagcgttgtggagatgattattcagtcatgtacttggtcattcagatacattacttcactgattatttctctcaccccaagaggtgagtgctatcactattcatcagtaagtcaaacacttagtggaagaaactgaatttaaattcacatctactgggcttcaaaggctacattctttctactgtgatgtgttatggaaataccagattagattaaaaagtttgaaagcaggccaagtatggtggctcacacctgtaatgccagaaattgggaggcaggaggatcacttgaacccaggagttcaagaccagcctgggcaatgcagagagaccccatctctcaaaaaacaattttgacatagctgggtgtagtggtgcacacgtgtagtgccagctacctgagaggatcgcttgagcccaggtggttgatgctgctatgagatgtgattgcaccactgcactccagcctgggcaacagagtgagaccctgtctaaaaacaaaaacaaaaacctttagaaacagcatacacagcatctgggattttgtagatggaaagaaattgtgattcttgacttctaacttgaaagaacccaaagaagaagagcatttgattaattgccctaaaaccaggtgcagagttaccatctcttatctgcaccaagatccaaaagcctttgaattccaaaagttttgtcctaagtttggggaatagtcatttggcagcaaaatctaatcagaactgacatgaggctattataatctttatgaatctcactgcatgtgactttcatacaattttctgcaggaagtggatatgttatagcaagcagtgttaccccagaccgtgcagggggcattatgataaatggtctagaatgcgcatataactatataaaattggaaaatcctgaattcagaggcataactagccccaagatttctgatggacccatgcagctttgtgttctttatcttcatttcttggaggtagttacaccagccaattgttaagacagccatgtcactgaagaaaaatgagaagcttttatcagaagagcaagctatgaccccagaagacttgtcagaaaatagtacatgttgcaggaggctagagggtgggaaggggagagaaagcagaagagatgggggcagagagagatagaaagagagtgggtttatgagtgggagaaaattgctttgagattttaatacttacacttttaataggtaagagcctatttattttttcctttagatggtacaggaacagacactaggaatccttatagtcctggaattttctaggcctgtatctcttttatacacttaaaatatgttttaagtgtatgaaggagtttatgaaagtttaagtgtatgaaagtttttaaatatatctttttaaaagctttatctcagttcatttgtatgattgtatggcatgactcaatatagtacttaagtattaaatacagtaaacatctctccaaatcttcttctccttggaatttgagacttttattaaagaaaatgaagtaagttattttctttgttttagtcaacagaagtaaagtttcatgtgctccttttctttacacttctacagtttgatgttcttgcatcagcagctgcagagcagtctgaatagtttatacatgtgatgagagcattattttcattggcatttcccacgtcctatgaggtctttctcctagctccatctgagcgtgcctctggagatctgagaaagtgacaaatgatgacagatgagataaattcatctcattagaggcttggtccatgtaggacagttctactgcgcatgtgtgtaagcatttttccccagagcagttttgaaaattaagactcataaacatttgttaaattatcttattcccctaggatatttatactttgttataagaaaacgcatcttaatttttttttgtttttgcctctttaacactgaatggtcaatgctaaaaccaggttctgttgctatctgaattgcatcttttcctgttactaaagttaggggagtttttctgtaacgtttgttaaatgattcatgaattgcttgctctgtctgctttataagctattggataaatgtcggcactgcattcgcttgtaggaaataccttccagatctagtctttaggtttgcaagtgtgaactttggtgagacaacaacccttggggttacatatttaacgagagagattggggatggttgatgactgtgatagctcgtggagtgggtggtgatggtgctctgggtatggaggtgagggacgtgttaggcagccctccagacttttttatgcccatctcttgttggagactgtccattactttctagttgcattaactaggaccagcagttaatggacaagcaagaagggagttagataaaaatgggtgaatatggattaagatgtgaagatgaattttattattattattattattattattatttgagatggagttttgctctttttgcccaagctagagtgcaatggcacgatctccattcactgcaacctccacctcctaggttcaagcaattctcttgcctcagcctcccgagtagctgggattacaggcgcgtgccaacacgcccagctaattttttgtagaaacagggtctcaccatgttaccaggctggtctcgaattcctgacctcaggtgatctgcctgcctcagcctcccaaagtgctgggattacaagcataagccacctcacccagccgattaattttaaattatatgggagaataagaaagaacaggtcatttgtggttatagttgtggtcctatctctttttaattaatcttttacctgaagttacttaatcttttttttttttttttttttttttgagatggagactcactctgtcacccaggcttgagtgcagtgttgtcatctcggctcactacaacctcctcatcccaagttcaagtgattctcctgcctctgcctcatgagtagctgggattacaggctcctgccaccatgcccgcctactttttgtgtttttagtagacacggggtttcaccatgttggcgaggctggtcttgaacttctgacctcatgatccacctgctttggcctcccaaagcgctgggattacaggcatgaaccaccgtgcccagcctctcttaatcttgataacactcttttcaagcagttgctttacatattgagaaactaagacatgaatttgttttttttgttgttgttttttgttttttgatacggagcttcgctcttgttgcccagactagagtgcagtggcatgatcttggctcactgcaacctctgcctcttgggttcaagcaattctcttgcctcaggctcccaagtagctgggattacaggtatgcgccaccatgcccggctaattttgtgtttttagtagagatggggtttcaccatgttggtcaggttggtctcaaactcctggcctcaggtgatccacccacctcagcttcctaaagtactgggattatagacatgagccactatgcctggcctcacttaattttgataacactcttttcaagcagttgctttacatattgagaacctaagacatggatttgatatctttggtaagcgcacacaaccactaggtagttgagagagaatgcaggaatttatccagagctgaggagagactatcctcactcttaggcatttaaagttgattgggaaggaccaaactgaagatccacagagatgggtggtcagggctgctatagttgaggtgtgtctcagaatgataacatgttgacataggcatggattggaatgtacagaaaaggagaatggtgaggcttgtgtgtgcttgaagtctggaggttgcgcatggaaggatgagtgggagatgaaaggaggctgcacaagtgggtggatagcagtaagaagaatttatgggtgattgggactcacgaaagccttggtgggtgagggtggaccatgatgaaagatgtgtaaggaactatagatgctttggtgaggaaaggagagaggaagagtttattggtgctgaattgggaatgttctagaggtttgtaattttttttctacccagtttaaagatgaaacagtgaggaacttttgagtcaaatggatctatactgaatctcccagtttgctacctaaagatcaagttacttgataattcctagctaaaaaagtaaagaatacttttagagagtagatccagaagtcaatcacatacacagccagtgctagaattctctttttctttttttcctactgcaaatagctttgctagtatatttttgtggcaggggaataaataggtttatgtccattagatgtaaatgaaaagactaggagatacacagttacgttcaactttgaggaaaaaggtagggaaagatacagcttgactgtttttaggagtgtcaggccaccttttgtttttattggtgtttagctgtaggacacacattctatcaacagagcaatggtgacctttcattttttactctcccagtgacagaaaaaggatgtaattgttcaaagtctttcagtgcaactttaactccactgtaaaggggctgtaagtatcggtgcagtgtcctgcatagcagagagttcttggcaactactttgtcaatcagctccttttcctaactgtggttctcatcatttgcttattgtttgcccaaagttgaaaggttctttcaggtaggttgtcaagttgacttaggagtaaaagcccatggtggttcaaggcagaatggcacagatggtcagttttagccaatagttgtttcagaaacagcaactcaatgtgtcaggcaaaatccttggagtataaattctgattccagttttaccagcattgtgttgtgactttgggaagataaagaattttggttggcctgtgatgatcttctttaagtgctctgatatgtaaatatatgttctctagcagctattcttctcaattgttgtggttaattttttttttcatcaccaagagctatgttgtggggacaagggcagtgtccatctgtggctgcattattgctgctccttttggtcaggcttttcgtcctgtctgcttcctagtacccaaatctaaatgtattctctaagaaatctgtgaatcttatttttttttaattttatgtattccctaaggaatttgtgaatcttatttgttaaatcatgatcttatgtattgaggaaaataattattaagcttattttatttgactgtcaaaaatataaagctattctaggattactgattagttgaaaatcttagtaatcgttaccaattgtgggaagaacggtggtttcatatgagtacagtatgactagcggtttttaaaaatgaggaatacatgggaattctcagggcattatattttacccatgaaataattctatttttagtaatagctacttaaattaatttcatctaggttttgttctcacatgatctgtttcttaaactttttgtttatttaacattatattttatacatgaaataattatgttttgagtaatagctacttaaattaatttcgtctaggttttgttctcacgtgatctgtttcttaaactttttgttgatttgacatcaaattctaagtactacagaaagtacaaaaggcatcaatgtgaggcagtggagagaggaaggctgtaaatatagaacagtgtccatatgaaaacaccacagaggcatattctatttctatagaggtattttatttttacaggattttattttttccaaaattcaagctaggttcttctacttttttttattaaaaagcatcctaaaactatgtactttatagcatattggattatctgtggaatccagtaccctagccctgtctgtcatcatggaaatactcacagggcaatgagctgtgtacacccaaatgtttctgggcagaaatggattggctgcctactgggttgtgtcttacctgattaggagcttcttcagtatcagggagcaaagttgtacttgagcaatttaggatgtgcattttaccctttccacttctgcacaaaaatataaatgttgggatatgagttttacagagttgggtgcatgtaggcactgatgtttctctgatgactctcctggcaactttggctctccccagtgttgcttttgtttgacttttatgtacagaacagattttagtcttgtttggacacatctatacccaatttgttttccaaagctcatgcctgagcccaaccgaaggctgtattcctatttgaccactcagtattctcatggacactggaaaaacaataatacaaagccatgcgaagcatgctggctacaaggtttattgaaaggttttccagccacagtgtctctgtatttttataggatagtgtattttgtgagacacttttaaaagtgttaaaatacatggaggaaacattatgccatctggatattttgccacagaaggtaagtgaaatgtgaaaatgctatttttgaccattggagttgtactttctggcatgttggctggcttcacaggagcatattcttctactgcctgccccttttccctcccacctactcctcctgtgcccatggcagggactagatgtgtggccaaatccaaagtcaattacctgtatagccctccataactcatcaccagtagtgcagaaagaggaggcatcccatgcagaatcaactttagttactggtctctttcttagaaaactcaaacattgtcataactgtcataagaaaacagtgttttcttatccctctcttatgcttatgacattggttgatctatgacttgaacaaaaaattcatggaacccattgtgagcaggaaaggtgttatctgaaaggctttaaacaaccctgatgtcaggttttcctgccagtaatgatagctggagatatgctcagatgctggctgctttcttgccttagtgtgttccactgaatgcatgatgcatgcacttgtgaatacatgcagatacatgggtgtagctgcttgaaagactggatctttcatgggacagcacattaggctttttttttttttccaaacaaggtctcataatgtcatctaggctggagtacagtggtgtgattatggcttaccgtagcctcaaacctctgggctcaagcagttgtcccaccttaatctcccaagcagctaggatcacaggtacatgccaccaagactggttttttttaatatttattttgtagagaaggagtctccctatgttgcccaggctgctctcaaactcctgagctcaaggcacattgggcattatgttgctatgttgaaacatacttcctgcttcctcatattgatacctgcttactgtacatgtacacatggataatgcacaggtcctgtgtctctctgctgtggggaattaactcatgcaacttactgtgcactctccatcttgcggtagaagtggtttagttagaaaatgggagaactgtttttaaatatccctttggaactgtgtaaatgttgaattaaagtgtccttaaaaagcagtggtttctttaacttttgagcatgtgtgatgtcccctgtgaggtaaaacactctgcttgcttccattcaccagtggctgatttgcaggcttgtgcactctgtggcttacgctgttctctctgaggatgattatgaggagtggctgaaaggctatcaagaagccagcaacacattgaaaaatggagctcagtggttggaagagtgtggtcagatcattgagaagttaaccacacatgatagtctttacagatccaagaaggacttaagcagctaccgaacaaaatctttgaacaggcatccttctactatatagtgatgttttcttgttctgtttcttgttcttttcctattctcttgtcttgttctctgagacatttctttgtttgctttaagaagcacttaattttcatggctatctgaaatatctagccaccctcaactgagaatgacagcttaagaactctcaggccaaaaacagcatcagtgactttctggctttgcttaggattaggcttaatgagattagctcaccgctcaccgtgttgagttacatgaacaatcagaacgctgtgggctgattagacaatgtacacactaagcattctcacacttacttgtggtaataatatttaagttttgccattgctactctgtattgcctacttcattttgttgttgttgttgttatggtggctgtcttcactctatcccaaagcattaggtagctttctttttatgggagtccctcaagtctgagagctggatttcaactttttctgttttatgtcagcaaccattagaccatccattttccaatttctataactttgaagccatcacttgtttgcttttttcatttcttttttttattttttaattccttttagttttttatgctcagtttttatgtttcttattcaattgtttatattcagtcattttaatggaatttgggtaggaatagaactgaattcaagtgttcatttgccttgatttagtggaattatccaaaattacttttagaatctgaaaacagtgattatatatactgggtaatttacaaaaagaaagaggcttattggacttacagttccatgtggctgaggagacctcacaattgtggcagaaggtgaaaggcacatttcacatggcagcagacaagaaaagagagcttgtgcagggaaattccactttttaaaagcatcagataatgtgagacttattcgctatcatgagaacagcacaggaaagacctgcccccatgattcaattacctcccaccaactcactcccatgacatgtgagaattcaagatgagatttggatggggacacaatcaaaccatgtcaacattttacttgcaaattatatttgaaattatattaagttactatgttgctagtcattcacaaaacatttaaacaaattgcgatgccagaactcatatattgacatgcagtgacccctggaaatcagtagagaaatgtattagaaaaaaagttctggcaaagacctggctgattgttggccttattacacaacctcaggcattggtcacattagctcacagagctaagaaaaaccaagtactaaccttgttactcaagactttaggtactattgatttagatggataaaagatttattacaaagttatcctgaagaatatgtccctcatgcagaggacccaggaggttatgatgaccccagaaagcctgaccagcagtaacagtaaaagttacatagggacatgagtgcagaaatattatctctactgaaaataagttttatactagggaagagttacagggtatatgtagaactttagcacacgggctcaaaccagatgtataagttctatatggtttatgggttaacaatggtaaatccattatgcttatgagaagtgaattagcacaaatgattggaatagcaaataactccagggttcatgatgaattaattgctagagcacaaaataaccaagacctctctgacttatgatggggatgggtaacagcagtttggatgagacaatactcaaacatcattcccaggttaatctaaactaaaaaatggaagactttagaaggagtcattaaaatactcaagaatatggaagattattattaatgtctgatgggacagtactttatagaacacctgggaaatttcccatcaaaaatgactttttaaaaagtcaagtaatatatccaagataaatccaattactcacaatatacacataatataccataatgaggtgggaaattgaagaaaaataaaattgaaaagaaagagaaataagctttcctgtattaggctgacttgtcccagaggcacaaactggcacatcccagacccaagaaaagtcttgataatattatctaatgtactctggagactctcccagcactccctcaacatagggagaagaaaaattttcctttgttttagggtatgagtttatagattcttgttctctgtaaccagtaacttcaagtattctgttttatctaaaaagcacagcaaaggtcatgagaaggctgagcaggcctgaactacagctatctagacaccatagtgaaggttatgggataagcccgtgcctaggcaaacctagataatggacatctgggtttcatagcaacagttatgtgcaatcctgagttatgaacctgttacaatttgattaactgtctttgtcctgtctctgtatcctgctttcatgccactgtaagcttgcttcaagctagcctacccccttttgtgaagtgtgtataaaagtcaagtgctgtctttgtttcaggcccagtctttggatgtgagtctgctgggcctgagtgcactcaataagagattctcctgttttaacccgaggtatctcttgtcctcctaaatcctgcaacaatataagactgatttttgactgccgtaaaatctttcttgcctctaaaccaacacttcattctatagtttaatcttctttccactttttctgttctcttagcttaaggaaagattatggcaaactttgtatgtttttcatatgtacttgcaaaagattatacaattttgttttgattattcttactttaggctgaaacttccctaatcttcccttagagattgtggcatatcatgctagtttccttttcatatccaattgtttcttctgcatttatcaccctagctatgtgattatattttctgagcttccctgcagcttgttatagctatttgactaagccagtgatttgtaagcactgtgctatgtgtaccttctataaatccttcctccttcttctcttcatctaccaagcagtctggaatgaaaatacaatagctggacatcactagccctcctaggtaatgcaggcaggagtgaagggcaacacagtctattaacttatttactagaagataagtttcagaacaataagaatcttgtttatgttggtcaaagcaatatccccagcgctcacacaaagtgtatggcatgtgctaagggctcaggtatcaaatgggtattgaatgaatgaataaattaatagttcactctggagtcatgagtaaacaaggtctcagcttatttcacataatcaaactcctgatcaaatcacattactctatttttttatctttactgcctcagccttgccaatgttatagaaagataagattttttttaaatgtacatcaatattcctttccattaaaatgttttaaaagctgtttttataacagtgctttccaatattttcctgcttagcaagttcaaaattctaggacttcagacaatattattcttaacacagaatgcagccactggatcctgaggatttcactagatgttagttactgaaactgaactttcttgaattcttttccttccactgtggtctcccgcatttcaacatatcacctatacttgtcctcaaactttatttaaatttttcaacagaaataaattaaatattaatcattactcctgccctgttttttgaagtgatccttttcttcctatgataacaattcctctgggcccttttcatggccacttttatggttatagggtttgtaaatacattttttgcaaatgcatataattttattaattattttttactctacctccaaagttgttgctatttaactcttcgtgagaaaaattaaactcatgttttacttttgttatatacttatttatacttgagctccttgatttctgctcaaattgcttttcaagttacctgctttttagagaagacattatttggttttcattaggtgtatcaagcttttcttgataggtgtatcaacaagtgtagacttctctataaagaatttctttttccagagtagttttctgaaaagtctattaaaacagagaaaaatacaggtcttcgaaagagctcttcctaaacctcccctctaccagaaatatttctatagtcacatggtcctttctcccttcttgcttttgtctgagtccaaaactaatctctccttgatctggactgcatgcacttgtgccttctcagggcccttttgtgttttttcttctctcttgacttcaaaaatgaggtttctgtattggctgttaccctttaacatagaactatacccaccctttttaaaaatctcagaataaaaaggcttgctttaccatgtatctcctttactacctcatctctcttctcagcgaaatatttgggaagagaagccctcagtttgtgtcattgttttctcacctccagttcactttccccactgcctgacatccagctcactcatgcacatcccttgtcactaagttgccatagacaacgtttagctgtcctgccctcctggcaaaatttgactctgtgcattgggataatatgtattcagcacctattgaccaggcactgcgttaggtcctgctgttatagaaatgagaagcagacatcctctccattctgataagactcagtggagcagctattcctgattcatatgcaggtcgcttgacttggcctagcttttgcaagcttcacttaatgccatgtaaatctccctattctccaagtctttctttccgattccccttgctatacacaacttctcaaggcaattgtctccatgctcatggcttcagttgccttctctattctttgaggacaaaacaattataaatgttttcatttaatagctttattttatacaagatgcctcatttgctataaacatagattcaaagttgctccataaaagtaattgctaaaatatggtgacatttttagcatgtaaattttagggaatttccccaattactcttaatggtttgatttagtatgtgtattatttttgaaaatatatgttgggatgtcacaaatggacttagtctacagagatttatatccaactcttgactagagagctccattttaatgtgatgctgagactaaaaacctatcttttccttcttacctatttttcttcctacattctctgctaggagaaaggcaccactgtttccccagtcccccacaccagagccttagcagctctgttttccctgtatctcccctcttcttaacatataattaccaagcactacctattctatctcccaatgatcacaaaacttttccctttgctttaatcactgccactgcctttaacattactcttctttaagatgaagcctgttagttggtcctgttgtttcctgcaatcctttattattgttcagagtgaccacactgcacacacatctgacagtgatgcctcacctttgtatggttcaaagattctcatgttttcagaataaaattaaaaccaccccagcaccaaatttggaatcaaatagacctgggtttgtatcccaggttcatgcactgtccagaagtgtggtctcagaaaactgaactttctaagcctttgtttgcttatctgcctaaactctctgagagtggggactgtttcatatatacagtgcctggcacgtagaagggacttaattattattaagccaaaggataatttagagacacaaacaagaagacacacaaaatggagggtctaatgccagcctggaagaatgagatgagacagcaagaactgggcatttaggtagggaggaaagaaattgactgcaccctgtggggaaagactaaggggtgggaatgcaaggcagagccagtctttggtcctggtgcccagccctgggaaagctggctacaggccgatgtggaggatacctcccagggtaccctggggacagtgtcagccactgaatgaagaatgaaggggagacatttttaaatcgacatgaaaaaaatctttgttctttcaaaaattatacgaacctacaatatcacttcctctaaaagatcgacttccaccttcactttctgataatcaggctgggggaattggggaatatagactacctggaatcaaatcctggctacccctgagcagtcatgtgactttggggagcttacttacttcttcatctcaatttattctgtaaaatttgtaaaatgagattatttctgagggttaaatgagcataccacagttggaacactgtcaggcacatgctgtttgccagttgttgactattcatctttattgaattaggactatggtactctactttatggttctcaagtttgtatgagaaaatcatgcttagtgcattgataatcaaagaaacaaaatcagaaaaaccctgccatggaaggaagacacagaggggaaaaaagggagtgggctagtttcagtatttcagagcttgtggggacaagttagttccctattttataaacaaggaagtggaggcaggatgtgtcctgggatctcatgcaagatacacagtgataactccttactgagagtagaactagggtcccaggaattgctatggacaaagttctgacaaaaattaccccttggaagacaggaggagagggaggagagtgtttagatacaaaaacattcaacaatttaggcatatctaaattcagtgagcaaatgaaaaatgtactacttggcaaaacgaacttgctaatgggacccattctactaactgggacttcctgcagaacttatagaggaggatggcttcaactaacaaattggcctgtgctttcctcaggacctaaaagctcagaaagcctgtgatgaatgaaagcattagtcccaatagcactgcacaaggggccaggaaagcagcagcatcataaatgacagggtggggtagcccagtctgggacactgtgagctgtggggcagggcagcagctgggcagggcattgtgaactgtgggatagggcagccgggtggggcattgtgagccacatgcctgggatcccctgggtcagtgggcttcagtctggaggtgattgcagaaggaggagcagctccctttgttgtctcttcaggcagctgtagtgtctcttcagcatttgttgggttcacaacctatttaaaagccagctggtcttcaccctcccagacaagtcagctcaagggaggcggtggggtgcgggccttggcctgagccccacccaaggctgagctgtggggcagtcaggagagcagcaggcaagaccatctctgcaggcgcagtgaagccctggcctagagcagcaggtgtgagaggccaaacctgcaagctaaggcacaggtagtggcagagaggagtagaggccccccatggggaacacactgaactgttgtgtgtgccccaagtggggctggcaccggggtcgtgtgtggccctgtgagcctgagatctgtgaggcaataactgggaacacaacgccagtagcaccagtgcctgctgctgtatagcctactgaatttgcttttgaagctgttgagagcctccatgtacaccacatccatgaccaagagattccagaaggtaaggaggtgatggatgccatctgctcttggcacacctttggctgccactgtccccagggtcccctgggaggtatcctctacataggtctccttcatgcctgtagccagctttcccagggctgggcaccaggcacaaagactggctctgccttgtattcccaccccttagtctttccccacagggtccagtgaatttttttcctctctacctaaatgcctagttcttgctgtctcatctcattcttccaggctggcattggaccctccactttgtgcctcttcctgcttgtgtctctatttattatcctttggcataagaagcattatttgaggcttttttttttggtatattctctcctgcttctaaataatatctcaaataccccagcattccagtacctatccattctctctctttacctatccagatggtgcctaagtaaaggaaccaggtaagtgcccaagtgttcccttccttccatttattagcgtatggaagaaataatactaatactaatactcaggacaattcatacccaaatattttggaatttcttatttaaattcaaaatagaggttgccatggtattcttaataggttgttttaagtcaccttgatagaagctgctaattccttctaactataatttgaacacagaaggaaagaaaatggagcgtgcttaaaataattgggaaagatgtgaagtgctactgccagggctgcagaaaaattaacgtgttttccccccaaaggaatttacccatgaagttctgtttactttaaaattcccagtttacactgggcagggtggcttaggcctgtaatccgagcactttgggaggcctaggcaggtggatcacctgaggtccagagtttgagaccagcctggccaacatgacaaaaccacgtctctactaaaaataaataaataaataaatattagccaggcatggtggtgagcccctgtaatcccagctacttgggaggctgaggcaggagaatcgcttgaacccgggaggcagaggttccagggagccaagatgtgccattggactctagcctgggagacagagcgagactccgtctcgaaaaaaaaaaagaaagaaagaaaattcccagtttaacacaaaatgggtctccacatttattttggtgacttaacagacttcatttacctccttgttctaaaagagaagtggggcggttcatgatcaaaagcttcaaagagatgaaacataagtttggacttcaatttgtaatgtaaagattggaagtcaaaatgccagaccttaactatgcaagagtgtttgttgccatggttcctctttccccctcctgccagtagcatcttgttcaaagataagagagtaggagttcttcagactttaaacttctgggagaggcagggggatgggaagaggtagaaaagaggaaacatttaaaattttgcctctaaaattttggaaagagataaatctaggtaaaaataattctggataacaatatgtcttgaataaaaagtaaatcttccaaaatagaaaacactgtattgtaaagatatttaaatccagttggttcattggtttcatttaaatgtcagagatttcattaatttagaggaaatgtcttgtagctcttctataaaaactttggttgggctcttaagtttttaaaaaggtagaataattaagactcatgatgaatgtgactttgtaactgggatgtactatactcacttttcaggatatttcagaattgtcttagaataaataaatacgttatatgaattaattgattatacctttatccacaaagcacgtaagtacttgtgtaaacttctgctttgcttgaaagtgtaaggtaagactctgagtgattttatacatgagttagtagacgagtagttttggatgacagcccaaaatagactctttattgtcattcttcaggatttacaacacttttttcacttttttttttttttttttttttgagacggagtctcactttgttgccaggctggagtgcagtggtgcgatctcggctcactgcaacctccacctcctgggttcaagcgattctcctgcctcggccttctgagtagctgggactacaggcgcatgccaacaaacccagctaatttttgtatttttagtagagacagggtttcaccatgttggccaggatggtctcaatctcttgacctcgtgatctgtccaccttggcctcccaaagggctgggattacaggcgtgagccaccttgctcggcctacaacacattttatgtatgtctcatttggcccctccaaatacagataaggcctctgtatgttctccctatattgctaatgaagaaacaaaaagagatcttaaatgactagtaaaacagctactaaacagaactaaggtttgtaagtcctcagaatgacatggaaatgatagatatgctgaatttagttctttaaagtttttaaaactccagaatacatcttatattttactgtaaagtagacctgtcttttaaaatgatttttaaatgatttttaaaattatttattccatttaaagttcattttacacaactcaaaggcaacatttacctcttcatttttttctaaataaaggagagtctgactacgttacccatgctggcctcaaattgctggcctgggctcaatagacttttccaccacagcctcctgagctgctgggactacaggcatctgccatcttgcctggccctatctcatgtctatacatttatttcaatggataagaataaaagtagaggtagtgaaatagctcaggtttgtcattcaaataaacaagttgataaattctaaagaatttctcttggttactgtgaattgaagctgagagtgtgtgggacaggagaaggtggcaagaggcaggtaaggaaccaggcattaagcatagggtgataaggagtgttacagcagaatagctttaaaaaaagtttgtgagcacagaatttctcattttgtgttgattaccatgaccattaaatttttatttcaatttgtctttttaattgtatttgtgtggaattcaataaaacaataagcaaaatctcaatttcatcatttgcctattaacttttcataggaacacagcaaagcaccaaatgataaaagtatagacacattgaaagtttgcttctaaaatctttatttgagacaattttatattggtactcctggaaactgagaaatttctacttagatgtgaaacattttggttttttttcaatgaggaattaaattatttcggttgtttagaaaaaattagacacaagttatgctttacttttgtcttctctcctgaaacatttcagaagaacgagatttatttaaggcatttcagaaagctgtttctaagaacctggaatagatttcagattactcaaaagtgttttttactaccttaccttcatttagcagcctagctaatgtaactcaaggtagtaactgtaacacaaagtaaggtactgtgatcttattatccagtttcactgttactcaccaatttttcatgcagccttttatgttctgactttagaagctttactaatttgggaggtaaaggtgctctccagtgacccatttctttcccctaccctagcggtgagggaaggaaagaatggacaatatgaagtgaaaaagcctctgagcaacagacttgtcctcttttcagtagctattttaagccctcctttccaatgtgtttaatggaaaacatacagaaaatacagaaaagtaatttgttctactcagaatactcaaagctaatattcattatgattctgatattgattctttcttaatctttatgcatgtgaatataacatttcttcaaaaacaagattactgtatatgtgctgcttcctaacttttacctaacacagtgaaataatgacataagttcctgaaacagtgcttgacatctagagagcactccaggatgtctttccatgcctgtgcacctgcaccctgttctacctcatgccttctaatagaatattggtataccatggactggttggagcattacttatttacttgtcatttatgactgtatatcttttatagtaacatcatacacagttccattttgtttgatcatgcggacacagataaaaaatgtactttgataactgatgcattgtacctccctataaaattcagatggtatatttttgtctcagaacataaatcaatgggatgagtcattttgtagttagggtagtttagtattaaatgttcctttgccaaactgaagttaaccattgactattcactggatattagcatttctcattaaagtttttgtgattcttggtagctcttttgcagttcctggcagttctgaatagctgcccctttaagagttctgatgctgtcttagatgaccaatcaggagacagcactagaagaaatcttagaagatgtgggaaaactgggagaacttaactagttttaggtatactgaaacatatgtaatgagcatatgtgttccagatgcagggcaaatggtactacacaagacagactgcccatcctaactctgaaccttacattctagagggagctagggatcaatagcacttgaataatcaagaatgtgaggtggtgaaatgtttagaagaaagtaaaacagagcaatggattgaagaggagggcagttttacagtagggaaggaggcagaagttggctgctttccttaggtgacatgcgagcagttctaaaagtgaggggaaacttgtgaggatgtggagagcttccacacagaggaatagctgcttttgagttccttaaatggaagcaaacttggtttgaccaaaggacaaaaaaacacaagggtggctgcagcagattgaaagacaggccaggtggttaagaccttacagaaagacacaaggatggctgcagcagagtgaaaggcagaccaggtgggttaagaccttgtatgcaatatgagccttgacaaagattatagactttgtgatgagaagccattggaggaatatagcccagggaatactgatagttctttaagaaaaagatcagattagctgctctgtgagaatatgctgggatgcaggtgagggtggaaggaggcagaccagctaggaagctgatggagtggttcagatgagactcaacagtgaacagaaaaataagaaggacctgaaataggctgacttgaagaaattaagtgaatccggaagtaggtaacaaagtgatcaatagacaagtcacaaaaaaatgcagataatctttaaacacatcttaacacataagagaaatgcaaatgaaaactatgctgcagtttctctcttattgggagaaatttcaaaaactttccaatacattctttggtatggctgtgaaggaagttgtgtccatatgttgctggtggaaatgcaaagtggctcagctccataaagaaaactttgacataatcttacagcattgcaaatgcatttatttatttattttattatactttaagttcaagggtacatgtgcccatatgcaggtttgatacataggtatacatgtaccatgttgctttgctgcacccatcaactcgtcatttactttaggtatttctcctaatgctatccctctcccaggcccccaccccgcaacaggccctggtgtgtgatgttccccatcctgtgtccaagtgttctcattgttcaattcccacctatgagtgagaacatgcggtgttcggttttttgtccttgcaatagtttgctgagaatgatggtttccagcttcgtccatgtccctacaaaggacatgaactcatccttttttatggctgcataatatttcatggtgtatatgtaccatattttcttaattcaatctagtattgatggacatttgggttggttccaagtctttgctattgtgaatagtgctgcaataaacatatgtgtgcatgtgtttttatagtagaatgatttataatcctttgggtatatacccagtaatgggattgcagggccaaatggtatttctagttctagatccttgaggaattgccacactgtcttccacaatggttgaactggtttacagtcccaccaacagtataaaagtgttcctatttctccgcatcctctccagcatctgttgtttcctgaatttttaatgatcaccattctaactggcatgagatggtatctcgtggttttgagttgcatttctcagatgaccagtgatgatgagcattttttcatgtgtctgttggctgcataaacgtcttcttttgagaaatgtctgtttatatcctttgcccactttttgatggggtcgtttgtttttttcttgtaaatttgtttaagttctttgtagattctggatattagccctttgccagatgggtagattgcaaaaattttctcctattctgtaggttgcctgttcactctgatggtagtttcttttgctgtgcagaagctctttagtttaattagatcccatttgtcaattttggcttttgttgccattgcttttggtgttttagtcatgaagtccttgcccatgcctatgtcctgaatggtattgcctaggttttcttctagggtttttatggttttaggtctaacatttaagtctttaatccatcttgaattaacttttgtgtaaggtgtaaggaagggatccagtttcagttttctgcatatggctagccagttttcccagcaccacttattaaatagggaatcctttccccatttctcgtttttgtcaggtttgtcaaaaatcagatgactgtagatgtgtggtgttatttctgaggcctctgttctgttccattggtctatatatctgttttggtaccagtaccatgctgttttggttactgtagccttgtagtatagcttaaagccaggtagtgtgatgcctccagctttattctttttgcttaggattgtcttggcaatgcaggctcttttttggttccatatgaactttaaagtagttttttccaattctgtaaagaaagtcattggtagcttgatggggatggcattgaatctataaattactttgggcagtatggccattttcactatattgatttttcctatccatgagcatggattgttcttctgttgcaggaagtcagggaccccgaacggagggacaggctggagccgtggcagaacaacataaattgtgaagatttcatcttaatatggaagtttatcagttccgaaataatacttttataatttcttatgcctgtctgtactttaatctcttaatcctgttatctttgtaagttgaagatgtatgtcacctcaggaccactgtgataattgtgttaactgtaaaaactgattgtaaaacgtgtgtttgctgtagtcccagctactcaggaggctgaggcaggagaatggcgtcaacccaggaggcggagcttgcagtgagccaggatcgcaccactgcactctagcctgggcaacagagcaagactccgtctcaaaaaaaaaaaaacaaaaaaaaaaaccatgtgtgtttgaataatatgaaatcagtgcaccttgaaaaagaacagaataacagtgatttttatggaaaaagggaagacaaccataaggtctgactgcctgtggggtcgggcaaaaacagccatatttttcttcttgcagagagcctataaatggacgtgcaagtaggaaacatattgctaaattctttcctagcaaggaatattaatattaataccctgggaaaggaatgcattctgaggggaggtctataaatggccgctctgggaatgtctatgttgtgcagttgagataaggactgagatacgccctggtctcctgcagaacgctcaggcttactagggctgggaaaactctgccctggtaaatttgtgatcagaccagttctctgctctcgaaccctgttttatgttgtttaagatgtttatcaagacaatacatgcaccactgaacacagacccttatcagtggttctccttttgccctttgtcctgttccttcagaagcatgtgatctttgttggacccttatcagtggttctgctttttgcgtgttgaagaatgtgatctttgtacctactccctgttcttacaccccctacccttttgaaacccttaataaaaacttgctggtctgagactcaggtaggcatcatggtcctaccaatatgtgatgtcacccctggcagcccagctgtaaaattcctctctttgtactgtctctctttatttctcagccagtcaacacttacagagaatagaaaggacctatgttaaaatattgggggtaggttcccccagtattcttccatttgtttgtgtactcttttatttcattgagcagtggtttgtagttctccttgaagaggtccttcacttcctttgtaagttggattcctaggtattttattctctttgtagcaattgtgaatgggagttcactaatgatttggctctctgtttgtctgttattggtgtataggaatgcttgtgatttttgcacattgattttgtatcctgagactttgctgaagctgcttatcagctcaaggagattttgggttgagataatgaggttttctaaatatataatcatgtcatctgcaaacagggacaatttgacttcctcttttcctaattgaataccctttatttctttctcttgcctgattgccctggccagaatttccaacactgtgttgaataggaatggtgagagagagcatccttgtcttgtgttgattttcaaagggaatgcttccagtttttgcctattcagtatgatattggctgtgggtttgtcataaatacctcttattattttgagatatgttccatcaatatctcgtttattgagagttcttagcatgaagggctattgaattttgtcaaaggccttttctggatctattgggataatcatatgttttttgtcattggttctgtttatgtgatggattacgtttattgatttgcataagttgaaccagccttgcatcccagggaagaagccaacttgatcgtggtggataagctttttgatgtgctgctggatttggtttgccagtattttattgaggattttcacatccatgttcatcagggatattggtgtgaaattctctttttctgttgtgtctctgccaggctttggtatcaggacgatgctggcctcatgagttacggaggactgcctccttttctattgattggaatagtttcagaaggaatggtaccacctcctctttgtacctacggtagaattcagctgtaaatccatatggtcctggactatttttattggtagactattaattattgcctcaatttcagagcctgttattggtctattcagagattcaatttcttcctggtttagtcttgggagggtgtatgtgtcgagaaatttatccatttcttctagattttttagtttgtttgtgtagaggtgtttctagtattctctgatggcagtttgtatttctgtgggatcagtggtcatatcccctttatcattttttattgcgtctattttattcttctctcttttcttctttactagtcttgctagtggtctattaattttgttgatcttttcaaaaaaccagctcctagattcattgattttttcaagggtttttcatgtgtctatctctttcagttctcccctgatcttagttatttcttgccttctgctagcttatgaatttgtttgctcttgcttctctagttcttgatgttagggtgtcgattttagagctttcctgctttctcttgtggggatttagtgctataaatttccctctacacactgctttaaacatgtccctgatattctggtacattgtgtctctgttctcattggtttcaaagaacatctttatttctgccttcattttgttatttactcagtagtcactcaggagcagtttcttcagtttccatgtagttgtgcagttttgagtgagtttctcaatcctgagttctaatttgattgcactgtggtgtgaaagacagtttgttgtgacttctgttcttttacatttgctgaggaatgctttacttccaattatcaggtcaattttagaataagtgccatgtggtgctcaggatgtatattctgttgattttgggtggaaagttctgtagatgtctgttaggtctgcttggtgcagagccgagttcaattcctggatatccttgttaaccttctgtcttgttgatctgtctaatattgacagtgggcttttaaagtctcccattataattgtgtgggagtctaagtctctttgtaggtctctaaggacttgctttatgaatctgggtgctcctgtattgggtgcatatataggatagttagctcttcttgttgaattgatccctttaccattatgtaatggccttctttgtctcttttaatctttgttggtttaaagtctgttttatcagagactaggattgcaaccgctgctttttttgttttccatttccttggtagattttcctccatccctttattttaatcctttgtgtgtctctgcacatgagatgggtttcctggatacagcacactgatgggtcttgactctttatccaatttgccagtctgtgtcttttaattggggcttttagcctatttacatttaaggttaatattgttatgtgtgaatttgttcctgtcattatgatgttagctggtttattttgcatcattagttgatgcagtttcttcatagcatgaatggtctttacaattggcatgtttttgtggtagctggtactggttaattctttccatgtttagtgctttcttcaggagctcttgtaaggcaggctggatggtgacaatctctctcagcatttgcttgtctgtaaaggattttatttctccttcacttatgaagcttagtttggctggatatgaaattctgggttgaaaattcttttctttaagaatgttgaatattggcccccactcccttctggcttgtagaatttctgctgagagttcagctgttagtctgatgggcttccctttgtgggtaacctgacctttctctctggctgcccttaacattttttccttcatttcaactttggtgaatctggcaattatgtgtcttggagttgctcttctcgaagagtatctttgtggtgttttctgtatttcctgaatttgaatgttggcctgccttgctaggttggggaagttctcatggatgatatcctgaagaatgttttccagcttggttccttctccctgtcactttcaggtacaccaatcaaacatagatttggtctcttcacatagtcccatatttcttgaaggctttgttcatttctttttactcttttttctctaaccttgtcttctctctttatttcattaatttgatcttcagtcactgatacccttccatcctcttgatcgaattggctattggagcttgtgcatgcatcactaagttctcataccatagttttcgaccccatcaggtcatttaaggtcttctctacacttagccatttgtctaaccttttttcaaggtttttagcttccttgcaatgggtttgaacatgctcctttagctcagagtagtttgttattaccaatcttctgaagcctacttccatcaattcatcaaagtcattctccatccagctttgtcccattgctggcaaggagcagcaatcttttggaagataagaggcactctggtttttagaattttcagcttttctgttctggtttctccccatctttgtggttttatcttcctttggtgtttgacgctggtgacctacaggtagggttttggtgtagatgtcctttttgtttatgttggtgctattcctttctctgtgttagttttccttctaatagtcagttccctcagctgcaggtctgttggagtttgctggaggtccactccagaccctgtttgtctgggtatcaccagtggaggctgcagaacaacaaatattgcagagcagcaaatattgctgcctaatccttcctctggaagctttgtctcagaggggcacctggctgtatgaggtgtcggtcagcccctactgggaggggtctccaagttaggctacacaggggtcagagacccacttgaggaggcagtctgtctgttctcagagcacaaacgtcgtgctgggagaaccactgctctcttcagaactgtcagacagagacgtttaagcctgcagaagctgtctgctgccttttgttcagctatgccctgcccacagaggtggagtctatagaggcagtaggccttactgagctgaagtgggctccacccagttcaagcttccagccactttatttacctactcaagcctcagcaatggcggatgccccttccccagccgcgctgctgcctcacagttcgatctcagactgctgtgctagcagtgagcaaggctccgtgggtgtgggacccaccaagccaggcatgggagagaatctccttgtctgccagttgctaagaccttgggaaaagcacagtatttgggcaggagtgtcccatttttccaggtacagtctgtcatggcttcccttggcttggaaagggaaataccctggccccttgagcttcctgggtgaggtgatgccccgccctgctttggcccgccctccgtgagctgcacccactgtccaaccagtgccaatgagatgaaccaggtacctcagttggaaatgcagaaatcacccatattctgcgtcgatcacgctgggagctacagcccagagctgttcctatttgaccatcttggaacagatcccctgtaaatgcatttaatccagaaattctactgtgaataatttttcctgaaggtgtatccatgaatataaaataacataaacacaaaatttttgttctattattttcaatagcaaaatattggaaataactcaaatgtctagaaagggactgataaaataaagtgatacaacaatgcaaaggagaactatggagttgtaaaaggaatgaaatctctctttactgctgtggagtgatttccaggttatattatgtaaaaaaaaaagcaatgaggggctgggtgcagtggctcacacctgtaatcctgcactttgggaggccaaggtgggcagatcatgaggttaggagatcgagaccatcatggctaacatagtgaaacctcatctctactaaaaatacaaaaaattagccagacctggtggcaggcacctgtagtcccagctacttgggaggctgaggcaggagaatggcgtgaacccgataggtggagcttgcagtgagctgagattgcaccactgcagtccagcctgggcaacagagtaagactccatctcaaaaaaaaaaaaaaaaaaagcaaggaggagaatgtacagtaatatacataaaagaaagcaggggaaacatgtatttgcttactgtaaaaaaaaaaaaaacaacactggaagggattcttgatgatgatgtgtgacagtttttcccttaacttcagtgggtagacaaagtgcatatttgctcaagatgttattttggcattggttttccagtgaatgctaaccatttattttttgcttttgagttaatttgtgaaagcttttctttgtaatttattgtttattttttagcatatagattgctcttgcatttcatttgatcctcataatattttgaatttgttgatataagaattatacttgttttacatgtgaggacaaggcctctgagaagtacaaattaggtttttcaaggtttggatatataagacttggtaaactgagagtgtaaattctacataagactagaatttatagaatgattcatgagtttatttgaataccctttttattttactttcttaaagtttattaaagtaattaggctttagagttaaaactgtaatagtcagtggtgagaaatgaaaaggaggtacttataacccagaagtgttcttcttcttttaaagacagattattgctctcactcaggctggagtgcagtggcacgattgtagctcactgcagccttgaactcctgggctcaagcaattctcccacctcagagcatctgaagtagctatgactataagcgtgtaccactatgcctggctaattttcaaaatatgttttatagagatgagggtctcactgtgttgtcctgcctggtctcaaactcctggtgtcaagcaattctcccacattaacctcccaaagtgttgggattagaggcatgagtcaccacagctggctcagaaatgttcttaaaagcctaagaagtagagttaagtgctcttaagacatatataggccaggcgcagtggctcacgcctgtaatcccagcactttaggaggccgaggtgggtggatcacgaggtcaggagatcaagaccatcctggctaacaaggtgaaaccccatctctactaaaaatacaaaaaattagccaggcgtggtggagggcgcctgtagtcccagctactcgggaggctgaggcagaagaatggcatgaacctgggaggtggagcttgcagtgagctgagatcacgccactgcactccagcatgggtgacagtgcaagactctgtcaaaaaaaaaaaaaaaagaaacatataaagggggaagtatactacctaatgtgaaatgtcacagctcagtcacagtcactaaaacagatcgaggagttaaaaagttatggcaagactgagaactgacatggaggaacagcagtggttaggaagcccaaggtggggttgtccgacctgggaaagcagaaccaaggcatgagtgagcctgagatgggcacaaaggagctccacgtgtgccctcaggtgatacaggcaggccagctcaaggctatcaggtaggtagcatctgatatgtgaaaagtctggccttagataaaatctcaaactgcatcataattgagagacttggaatgtttttatgggccataaaactaataccaggtacagtatagggatgatagagcaggtcagtaaatgcagtaagtctttacataaacagatgctcagcagtgggctcagaaagtgttgacgtattttatttaattgggatatatgaaaataatatgttgaaattaatctctttctctgaatatgctccttctgtcagttaattccttcattactgccctctcccttttaatattttgacaggaaaaattatttcttgcataattttacaagttttacgtaagtttacagttgcataactttaatacctttggcctttaataatgcatcttacttattctaaattgcatacattgttttgttacatttttaacatctttacaattgagatagatcttacgactaatagaatcttagagaaaaaccggtattcagtgtcagcgagtctacagattccttcctctgagggatgtttacatttagacctgagcataactgttttttaagtcatacgtttccccatcattcttttatgctgccagatcacgttgtaacttaaattgataatacaaaaacactgggtcttaaaatacagtgatagttataacccctaatcatgagatcaaaattattttcctagtttcctagtttcaaacattttaggaggttacaaaaataattttgaaggtattcacatcaagttgtgtagttattgtgtttttatcctctggatgtctctaaatctccacaggtgcctgtttatggggcctaatattttatttaatagttggcagtcttttgtgacaatgaaaaaagagtagtgtgatttctcgactctccttaggctcttgggaaaagagttaatggagaatgaagaaataacagtgtatgtgtttaagtttctgtctaatggcttaagtgtccattctataaaatagcaatatgtggtatttgtcatcagcagaaattacaagttatatagaaaattgtggtaggctatagacataaaatgaatattttctgaaaaccccatgcaaataaacactagtaaattcctagtgaattcagtacatacagtatgtacaaatgatatgaaactcatcaaagtggaaataacattgttaactatggaaaaatggtcaaagtgtataatctaataaacaaatataagttagagcctcaatagtgttcctccttcacatcagtaggaatttttttaagtatccaaagctgaactagaagctaaaactggtgtgatttgaagcactgtgccctaatatgcccatatcttctttagaaagcaacttagcactatatattgattcatgaaaacaatctcacctttgttctagtcattccacttttgaaaatctttccaaaggatctctaagaaaaagtacaagatactatacatgaaggttttcctcataagaacaaaactttgtaaatgcctaaatcaccgacaatagggcattggctaagtaaagtataggaataacacttgatgagccaatattttccaaaggggtcaaggtcatttgtaagaaaataaaacataaatggtgtactgcttagagctatttttttaccatgcataaggaaaacaaaaagtaatggttgtgagttttaaacaaggcattattttggctcttgcaaatttctgttcttgataagacatttcttaaagaagtaagcaagagacttttacctattcctgcctttagtgtaatcatcagtactatcagcagtgctgactaaccaagtctcttacaattgccagttgaagaaaatctacctcaaaatagttaaaaatgtttattgaaaaattaacttgcatagccagggagttaacaggagtcagtgaggcactgcttgaccaaggaatcaaatgatatccccagaacctatctcagttatgctcttctctgttgatctctcctgaaaatacccttctcttgatggtaatgggagccactggcaactcctggtcagctaccagtcctgtgagccagttcatcctttctcctctagttcttgggaagtcccagatgaactgcgattgactggccaacctctcggtcagatgcctaaaaccccaggaatgggagagtgacagcttgttacttgggctgatcttgttttatttcctgtatgttttcatttcttcttgatttttgtattgaaatacacaatagcacatcttggttttatgtgtggggtatatgtgtatgggcgtaagcctgctactttttgaatcttgtacataattttcctgggcttccatggaaaattccaaattaaacattatgacacaggtactgaaacattatatgagttctgcaaacattacttgttatgtttcacactcaaatgataatatatttgcttttttgatacaaagtagtcatggactttttcagaagctttaggttagggacggctatacaagtctcttcctgtcatgttgtgcacaaacaattttatttttccacatagctaacattatatcatcaaattttcaaatatgtgggaaaaaacttgaaaatgacttttgtgtaagttttttacataacaatagttttctcccagtaaacttcaaatcatggagaaaaagcagattttttagctatgtaatattctagtgagatggcagtattattaaaatagatgattcggatttctgctaaatcagaaactcctaaattatttttatactagattctaaccactttagttggagggaagaaaaggatcctgggtagataaatttgtgaaatgctgagttggacattattcactaacgggctgattagtttttactgtaccactgtgcactttgattttgtaaaagcaagggatagagtggattgtgatttgcccactaaaaccctttttaaaaagtagaacagttactaatatgtgatttggaaaatattgccttaattattactctgagtggatcttcacctagtttcttacaagattgcttaagataagtgggttgagatggacagtgctgaggagtgtcataggtttttattgttttcccttattacaccttttattatatgatgaaaatgtgtaataaaaattcaagaatattatttttagtcttgcttaaatggattatctcactttggtgcaaggtggactgtaaacagacctaccttgacatacatagggccaacattttttagaagaaggtctaagtaagatctgtttcaaaagtattcttgatgaagtcccaaatgaatcatgtgttggaaagaagtgagattttagctttggaaatggagggcaaaagttaaaaatcattttctgacatgaaagtgtccttatagattagagcattgaaatttttatgcagtccacttaaatctgccatgatgaattgcccctgaataaatcacagataagtaaatgaattagccatgttattttctgagggatagtggccaaaaaacagctctttattttagcatgtttgatatattgagctaatgtctgacagtaatttcacacagcatcagttgctgcttgagcctattcctaaaatgtgctgcgaatatcagtagagaggcaagtgattatatttttatttgataagtagaagtggtagatgcaggaggcagatgagggggagggtgtccggagaatctgtgacctgcctgtgcactgggagaatggggtggggtcacgggaagtttgcatcttgtgcagtggggaggagcctggcctcttcagcttgtgtgtggtggcctggtattcagtctgtgagttgggagcccgctggaaggatcccctctcgcttttctgagattttttgttcctttttgccaaataaattctgttctactcacccttcaatgtgtccttgagactaatctttcttggtcgtgtgacaagaacctggttttagctgaactaaggagcagagttttgcagcagaaggagcagggcatgtatatgacttctcttttgcattagattatttagttttagtctttttgaaagtccttgacatagcccagttttattccatatgtatacagagaggctataattttgcattcccaagtagaattattatatttttgcctttatttccttcatatttattactagaaacttttttcaggactatttaaaatgattgaaatgaatgtgtagctactttaaaaatcattttttctattcgcataaattatcacatttttttttctctgtagatagagctttggagccaaacccttctgatgatccaagggcaagcacagtcttcttgcaaaaatctcaaacagatggtgagacgacactgttttttccaccaagaagacgactgaaaactctctgtcataatgagtgtattatagaaagcatttagagaaacttacattggtttaaaattttcaacttttcatatattcacttgtcctattttaatgtgtgaaatacttctctttagttgttactgtgtgagtgaaaacatgtaaactttctgtttatacattttgctaccttttggcaacaccatttgtcatgtgatttaagagtagtcatagatttatctttattcataattttttattcatattttttgtctttcgccctttttcccttgctccaaagagttcattttaatgatgaatgatagaatttaggcttcagcttgatctttatttaaacaaataaaaaaaccatttgttcatcaatggggattgaatttgtgatttcagcctcctcttatacagtgctttaaccatatgagcttatcacatccaagtttatgctactcaaaacttttaagctattaaacttttcctgctaatgtaatataaatttaaacatccagtactcctgcttatattttaaatgttatggtaaatcctagtttatttgattaaaaagccatatacaaccaagttttttagttgatttcaacagcaagaatataaatgagggttctataataatatttgaagtaatgcagtacaataaaatttgggtttctaattgtgcttttatggtttgtgtggattttgcctgccttaagtcagtcatctctggtcaggacttgtgtttgttcatttttgcattgctataaagaaatacctgagtctgggtaatttattttttaaaaaagtttaattgggtcctagttccgcaggctttatgaacatagcttcaacacctgcttctgctgagggcctcagcaagcttacaatcataatggaaggcaaagggagagcaggtggtttcacatgagagagggagcaagagagaggggaagggggaaggtgccacactcttaactagctcttatgtaaattaccagaatgagaatttgctcattattgtgaggatggcaccaagccattcataaggaatccactgccattaccccaacacctcccaggaggccctgtctccaacattgagggtcacattctcatatgacatctggagggggcgaaatatctaaaccatataagaattgtatttctcagttccttccagagccatgggcttctcacagagtgtgtggaagccctgaaggctatttcctgtccctcaagtcttcagtggtaggaatgtttgcctttaaggccttccagcatcaaaggaggaggcagtgtaggaaacaaagcatggcccaagtccctcttggagcttttattattctggcctttgttagaaaaaaaaaatgattttgtttgctgcagatactatgtccaattaagtttgcatactcattttaaaatttaaatgtaagataggttactttccagttgtgcaaagacacattttttttgttagtgacatattagtagatgaccaataagtggtttgagatgcttacagggattctggtgcatctacagatttgtaccttgccaggaactagttcttagagctgctagctcttagattctagtaattaaagtaagccatgtgtaaacacagagtgagaaaataccaatgaatcatggctcatatatgcaacagttgttaaacttatttattagctaaatttctcatctggcttaatttgttatgcccctttttttgtacatgagcattctttcatttgactgtaatagaatagatgatagatgatagatagatagatagatagatagatagatagatagatagatattttttttaccccgagatggagtcttgctctgtcgcccacagctggagtgcaatggtgcgatcttggctcactgcaacctccgcctcctgattcaagtcattctcctgcctcagcctctcaagtagctgggataacaggtgcatgccaccatgcctggttatgaatgtaatagaatatctgttaggacaaaaagtaaagccaaatttttagattttactttataagatttattaggccctataatttaagttataaatagttggaaattatttttaaatggaattttgtctcatttacatagagataatcaatcagatgttagcaactattttattttatatttgtatcagaactgattttttttattcttagttcaagaaaagagaaagagcaacgacatgaaccatgtaagtaaatagtcacaaagttaagaaattcatagtttgaagtaaaatatgtctatcttgattccttaaaaataaaatgaggacccagtgttattagcatggaactctctttgtggactttgtaaatctcttctatctttccaagtatcagatttatgcagaaaagtctttagcttagtgtgtccatcttttaaaggatctgacatgcaagttaaattttaagaatgtggttggtataaagatctttatttaatcttaaaataaatcaaacaacaaaattagaataactaagttaattttccacactgtctattgactttctggtatagcaggtaaaagcacagctttctgggtataccatgacattatttttttcccattgctttgtccaattgtagcacatttttattaaatcagtaatatttacatgattctgcttatgccagtattatttactgctaagtcatacggtgtttcagctgtgcatcttcattacgtatccttcattcctttaaacagttctggcatctgagcacttcttcacttctcccagataatccttttcctggcctatgttagtttacccagccaaatgcagtaagtagccgttggctggtctctctgctttcacatcctgtaatttttagcatagaattaattgtctgactatattcatttgcctgtctctaacagttattcttaccccaagtgttgtaatatttgtcacatgcatatcaaaaatattcatcagctcaaatacatctgttttatatttctcttggggcaattttccttggccttttgtcatcctagttcagtgtagagtggctttcctagatgtgctacatgcttgcttttctaagctatctcttgaaagtcttctgagatctcacttaactgccctcttctgtgagattccctgagtcctagattctgtgtttccttctgccttgttatcttctctagttgtactagagcacattttcctgggaaagggcacatgggaacatgtttagagacccagccaatcttaaaacccttcttctttgatacagtataaaattttaggttgcaaacaactaaaatgcatactaatagaaataactcaatttataacaatatagttagaattaataccaagttaatttcagtagtatataaaatcttgcttctaaatagctctgttctctaccctcttctttgtgttattgttatacaaattacttctgaatacactattagccaaaaaaaaaaatttaggttgaaactaaatgttacagttctaaaggtattttgtaattgtgttcttattatagtattgttttttaatctgttgccattgtgtgatacattatttgtaaccgggttttacatatctctagaagcttttcaggaccttctttctctctgggattctgaaattttataatgcagcttggtgtggggatcttttctctttattggggctactaagtcttcagattatctcttctagagaatttcttttcttctctattttctctgttaaatttttctgatattcttgttattcagatgctgggctgcttagactcctgtatccgcattggtttttaatcccccaccccctcctattttccagtttgtcttttcattctacttcttggatatttttttactttatagtttaatatttctcatgtttctcttgttgagggcatttttttaaagttttgctccaaaatttttactggtcccatgaattattttttcctgttgttttgatctctcttgaatggtggtccttggctttcattggaagcaggacttctgttcacgaaggagactcactgtgaggttttggaaatgaagccagcatttcatttgggggacttcagtgtattatctggggatctttactctgggaccattccattccttccgagaaggctctcccaattttctgcctgggatgtaaaagcatggctacttgctttccagaagcagaggtggagttgtgtttcttgctgtacagtttttttccatctctcaggttttagctatggtatctctgaacccagaaatttcaggttttatatatccagagaacacacatttaaattccttgtaagatggaaggacaggtagacttggggatctaaccacagattttcaactgacctcgctcgcttttattttatgtctcaccctactttcagagatgccatttccctttaagttgaagtctgccttgggttctggaagacaaactggcttgcttgtttctgttccagtcacttcttgtaggcaccaaagttgtgctaccatgccagttaccactccattatctactttttataattcagcatttattaaaaatcatcagtgtcaatcttccctattggtcctgcatataacttgagttatatgagtaattctaatgaaatttcaggagagagggaataaatttatggtcaatctattacatttaacccaaatttatgacctatatttaaagtgtaaattataatttaatttcaatataattaatattaatccagataattttacttatatatttataataaacattacacttttataccattacctttttaaattttctttttatttctgagacaaggtctcactctatcattcaggctggagtgcagtggtacaatctcacctcactgcaatctccacatcccaggttcaagcgattctcccacctcagcctcctgagtaactgggattacagcgcccaccactgtacccggctaaattttagtagagacagggtttcatcatgttgaccaggcaggtctcgaactcctgacctcaagtgatctgcctgccttggtctctcaaagtgctgggattataggtgtgaaccactgtggccagcccttgtttagtattcctattcaaattttataccctgccatattgttccattacttcacactataaatggagctgttttcattaatgcccaaagtgttagaagtattaaattaaaatgtgttcatttttagcgtggtcaacatagcaagactgcatctctacaaaaacattaaaaaacaaattagccaggcatggtggcatgtccctgttgtctcacctactcagcaggctaaggcagaggattacttgagcccaggagtttgaggctgctgttagctctgattgtgccattgcactccagcctgggcagcaaagtgagactctgtctaaaaaaaaaaaagttaattttttgaaaaatacctaaaatttgtcctcccaaaaaggagagagacagaagtaaactttagaattttcaatgggctaaaacaaaaggcagcaggtacaatgaaaaaaagtcagtataggagttcaacagatactggacctttgatggtaatgttttggttttggcttactaaactataaggtatgatgattttctagtcttcattattcaaccttaagaatactaagtaacactttccattttgtgttaaagtttgtaaaattttatattcttggtatttatgctgactgaatgaagataatttgttcctttctagttttgactacctgaaataatacctataaatggtaaattgttactgtatttgatataattaaatatagtaagatttatcttccaaattggaactgatttaattaatttgtcaagcacttgttgaacttttaaacttgtccaaaattctgtgctcagcatctccaggtagagaagaaaggactctcccttccttggaaagacctactttcttatgaggggaatactctgtaagaattggtatcatgtgacaagttgtgaattagactgactagtttacaaaaatggaaatattctgtggtgtggttgctggcaaaggaatcacagagggtaaatggggtcaagtttgctgggacaaagaaaaagaatcctaggcagagagcagcaggaaactgtgtggcaggaaaatgcctatgcgcaggtcaaatgacttgtagaataaaatgaatcaactttggaaatgaatggaaagtactctccgagagtctcatttgagtgatgtcctggcagtcttattgaaacatgaagtgaaagttaaattcgtagagttgtctttgttatctgttttcaggatgtgagagaatattaaagtgatagtctttttatcttctatgtaagaaaacaggactagagaatgctatggctttctctgttgttggttatggagcagccctggcacacagagcctctgaatctaaaacacttgttttgtcccactgtctcctggaatattacatttaggattagtaacttagtaatgtagcattagtcttcattcattgcaataaaatgctcttgtgccaatattatttaatgcattacagcttattgcagtaagtaaataatagaaaatctcagctgctttatattgctttaaaaacactgacatcttaaacatttctcatttataaagaaggggaattcacaatagacgcttgccaggtctgatgataggtaccatattaagggcagccttttataacccatttctcaaacatcctctattgaatttaagagcctccaatgggtttcctatggagtgcacataagtccacactcagttcacgaagtgtaagaagtaccttagtactttgtcatttgacattttaaccaatgggaaaaaatacacttttataggtttaacttactgtgatgttttcttctatttcctttccccttcaggtatctactaagcattttactaaaaagtacagctcgtgttcaaccatatacctagatgacagcacagccagccagcctcatcttacaatcatagtaaaatcgtgagtacaactatgatgtcaagggacacagccccttattctaagatcatcctagccatcctcggttatttcagccgtttgattgtccttttgggcaatcagtttaagaaactggtgtcaactatatattgatttctgattctatatattagttttcaaaaaaatactaattttcagtttctcctttaactttagatttcacgttggaagggaaaattagttagcaaataatcaatccctggaaaagtatagttatttatttgatgcttttatgccttatgacaatgttgaacacaatgagtaagataggtgtcctttataggatgttttccccccaaaaaaaggtttcttatgagttacaggcctaaatcaatcaatgtgtactagttttgacattaatcttggaagaaagaacaactttttctctactggcaccgtagtgtatctgcatttgacttcccttcattttgcatgaatacctcatagggcacaagtgaagatgcacttttagaacaacctaagacgagcctttcaagtttattttaaaagcaacaacaacaacaacaccagctctgttggggttgtctagagaacatcattatcatctgcttggattatgagcgtttaatttttggaacacagttttagaacacagtttggaaagtgctaatttagaatattaatgtctttatctttcattgtacttctttttcttcacaagaggatggttgtcagttttacttttcattctataaacatagctagcttataaacaattttgtttctaatgcactagctttcctagccaaaccaattgtcagtaacttctattttaattaaaagtaggaagtttacactcatgataatgtcacttttctatctcacttctaacagtggttgagataaaattgtgtttcagcaaaaacttgactcaaactctgtctaaagtcttaagctttgtgacctattaagtaatccctaaacttctgtattcagccaagtctctaaacccttgggaaaaaaaattactgtactttggctagagtccctggcttctattcaaaagattgtaatatgttagtatacaattcaaaagtagttttaaagattaatcttgctcaaacaagtattcataaagtttatgtttttttcctccatcattctaatttttagaattctacttttggaagtgtagtaagttttaattttctgtcagcaagtttgagaaattatcacttggtatattcactattggtaacataaaggtttattgagcaaattaatagggcaaaatgggtttatgaacagattttggaaaatgttttatataggtgagtagagcattgttctcaatggaatgcatggaccacatttgattacttacgcaagttttcttaaaatatatgtctgcaatcacatgcctcttcctacctccacctctccttcaactctaggcactcagaagccttttaagaaaatagggatggatgtgaggcattcttatatggataaaagcatctcagaagattctgctttgaaccccaacccaatcattcggaaaccctgctgtacattggaatcacttgggaaattttaacaaccaccctgatgttcaaagttatacacaatgctaattaaatcaaaatgtctcatgttaaaaagaaggcagtttttaaagctcttcaggtgattccaacgtgcagcaaagtttgagagctactgcctgatttgaatttaggacaacaagctgctcctatttggtgggaccttgggcaagtcaattttaaacattctttttcttatctgtaaaatggtgttggattcaatgtcatttagatcattggtccttttcagcaggtaacttcacattgtgtgattttaaaattattttagagattaaaaacttcttgaagcactatagacatagccatcttagatactaatgttacaggcttttaaaaacatgctaatattatataaacctattgttaaattcagatttgccttccctcaattatttgagcctcattttagatgctgtgggcacatggaaaaacataacttatgtttcctaatacacagtgtctgtagacaacttaagaatacagtaacatatatctgaagagttttacttgttcataaatatttcacttaaactaattgaaagtacctgcccttaatattatactgtgtagtgctatgctgcattatcgttagcactgcttattttcagaaagctatcactgattttgtgtgtacctaggtttactaacatgaattatgcaaaagttattgtaaatgatttaatttggtataaaacacttttatcattaatttttaggaaatcataaaacacggatgggtaggagatagttaattaaatcaactaaagtgcagggcctaacaacttaaaaaaaacactactgtatgtcttaaatttaagcatatgtacacataggtataaattgcatgggatgaaaggttttgtgggtagaagagcatctaacagggaaatatgttattatttatatattataatcatcaacagaaacatgtcttctaacagtatattgcctagcattttgatcctcgtatttttgttaaaagacaaaaaactaaaacaagaatatagtgccctaatggtactgttctgaagtagaagatttaaatttcagggccactgggataatttcttcctccccccttttaaaaaaagtttttagacccaacaaatgataaaatccattgttatgattttttctctttccgtagtgtggccttagcaatatattatcacatgaagaaaaggtgagttcttttaaaacctttcttgttattccaactcattactttttataatatcaatctcagtgttagttcatagctatagacaccataagctgtattgtgcctactgaaatattgaagcatattatttgtgttttctttcacccttgagactctttaagtcctaacttattgagaatcccaaagaatctgtgtttatatactgtgtaagaaattaaaattgagatttttaaaaaatctgcttctggcttggattttactacctcagcactattgataactttgagctagataacgctttgttgtgaggaaataaatgctttgttggtgcattacaggaagtttagcagcattgatggcctttacccactagatgtcagtagtaagcaataacccaggttgtgacaacaaaaatattttctgaaaactatatcgttaacataaatagcattttttaaagaaaaataacttctctacaataaaaagttgagtaaaaagtgtgtcatgcattgatattattgcaaacctctaaagtttggcataatagaagacagatggattcccttcacaatatttttagagaagcaataagatgatcaagctttttgcaaatatatagttactaaaaggtgtatctttaatgtttttagataattgtgagtgttctttaatactacctcaaaactcccctgtaactagtttcttagttacaggggaattttgcatatcaatacatttattccatcaatactcactgatttttcttgtgcagtaaatgggtctttcccccatgcttgcttgtataagagtatgcattggttatttgggaaataatggtttatgttttgttgtgtcaaaaactcacttttgttagtatcaccatgtcttattaagagctctttaagtattgagaagctgtcgagtttacggtaggagtgtgttttccaaagttctgggttttagcctgaaagcttgactattatcattgagaacagttattctctttttttgtttaacttttatattaagttcatgggtatatgtgcaggtttgttacataggtgaacttgtgtcatggggatttgttgtacatattatttctctgcccgggtattaagcctagtacccattagttattttttctgatcctcttcctcttctcaccttctaccctccaaaagatttcagtgtgtgttgttcccctctatgtgttaatgtgttcccatcatttagctctcacttaccaatgagaacatgtgatatttggttttctattcttgtgttagtttgctaaggatgatggcctccagctccattcatattcctgcaaaggacatgatcttgttctttttatgactgcatagtattccatggtatatatgtaccacattttctttatacagtctaacattgatgggcatttatgttgatttcatatctttgcttttgtgaatagtgctacagtaagcctatgtgtgcgtgtgactttataatagaatgatttatattcttttaggtatatagccagtaatgggattggtcggttgaatggtaattctgtctgtaggtctttggggaatctccagactgtcttccacaatggttgaactaatttacactttcaccaataggggaacacttatttttcattgatgtaaaaggcttactttattcatttttgagaatgatagtcagttgtacttttaaataaaaacaatattttatttaaaaaagtgattattcagtttacatttaaatcattgtttctttttcttaacacaaccatactgcagtaagaagaagtgcttcttgttaactttccacttattcagagtattaaataggaaggcaaagatttaataataccattaattgttactgcttcatcaaagacattcttaactaaatcaggctctcttttttaactgtaaggggctgtggagaatagaatgacttctagtgtaatttgatcaccttgatttatgctgagaaaccttgatttatgctgaaaaaccagctatttcacccacttttgcttttataaaatcatggcaagtgtcacagtgagaaagcaggcaatgccttcatatccttttaaaaattattttaatttattttttatttttaatcagctttctcaggctgaaatagtatttttatcagaacagttttgactgcttgggcctcatgaaaaatggcctgcatagtattccatggtatatatgtaccacattttttatacagtctaatattgatgggcatttatgttgattccatatctcaggctgaaatagtatttttatcagaacagttttgactgcttgggcctcatgaaaaatggtctaggggatctccagaggtccacagagcacattgcaagaaccattggtttattaaacaggcaaaatgtattagttgtattaacctcttaagttcatcaaagactggcctgtttgaaaataaaaagacagattaagtttttaattcaaactacttaaaataaataaatatatcatgagaatctaatacagagaaaatgatgataaagagaataattatactattatcagtaattgatagtcattattatattattattaatactttttaattagtaattattaagagaaaaagactagggaatctgaatctcattcacatttatttatttattttattttattttatttattttttattttttttgagacggagtctctctctgtcacccaggctggagtgcagtggcactaccttggctcactgcaacctctgcctcctgggttcaagcgattctcctgtctcagcctcctgagtagctgggactacaggcatgtgccatcatgcccagccaatttttttttttttttttttgtatttgttgtagagacggtgtttcactatgttggctaggatggtctcgatctcctgacctcgtgatctgcctgccttggcctcccaaagtgctggaattacaggcatgagccactgcgcccggccatattcacatttactaaagttctaaagactttattgcccattactactgctttctaaaacattcttgtgttccaatgtcaggttagaggagtgaaaatacaacaggttcattaccatggcctgttagggagggtcagtacttactggcaattctgactggttactgtaataaaagacttcataggacttgatgtgctgagtaagaagagtccaggagaccctctgaaggtcaggctccgggagaaggatttgtaaaacagtttgccttggtgaagcaaaacagcaaaacacacaggaggcattattttactaaacagatatgtttagtaaatatattaatcatttctgaattaatttcttaaatgcacatttttactttatagagatgcagataaatccctcgatatgtttgacgagcaattacatccactcactgtatcacttttattgaggccgtatttttctcatagacttgtgtttgtttcacactgaagtcaaagacatttttaagtattcttccccatgccatgttgcatctaatcgtcttatttaagaactgttataaaaaggatgtgctggaataagaaatgacctgcagctctggttaattagtgagctaatgagagtaaatatataatccaaataacagaaaatgtatcttttaaaaagataattgtcagtagcatcaaacaataaacatttttgtaaatgcctttaacacatatacatgatttctgtgaatagaaataaaaaacaatgtaaatttaaataaatggtgtacaaattaaaagtgtacttcctcaggtacataatagccacatgtggctagtgaccgttgtattgaatagtgcaaccttagagccttatggctacagaaaactaaatgtgttttttcaaagtttgttgcagaggagaatgaattattgtcagtaagtaagactttaaagcctaaaagtagtttacatttttatagaattctatgggaaaaagagtagaaaggaacataaaaattttctgagcttgagcccatttttttcactgaatgttgatgactattgaatcattatagtatcttaagattccactgttcgtattttagaaactaaaagacatctccccaatccaaattgttctaagtgacacacaggcacaagtatgaatattgctgtcttaagaatacttcatttttttttccaacggatacttacatcacatcctttcttctttcagcaagaaaagatgccaaaggaatactttgagtatgttcctgaacacaagtttatttacagatttgtccatgttctttttaaagccacaaacctaacagctgaatttgcaatagtaactttggtaagatatttcttatttataaagcatttttagaagttggtacttgtacacagggtatggtgctgtttttaaataaaagttggcttctgggctgggagtggtggctcacacctgtaacttcaacactttgcggggaggctgaggcgggtagatcacctgaggtcaggagtttgaaaccagcctggccaacatggcgaaaacccaactctactaaaattataaaaattagccaggtgtgatgggggatgcctgtaatcccagctaatcaggaggctgaggcaggagaattgcttgaatccgggaggcagaggttgcaatgaaccaagatctccccattgcactccagcctgggtgacacagcaaaactctgcctaaaaaataaaataaaataaaaaagtttgcttctgaaattattatacaaactttaagagaaacttatgaaagcaaagtaaatacacacattcgagttgtatcatcattacagcttaaaatgttgccattgcgtttttcataatagaaccattgctattaaaagcagcgggagagatttctgatttcccccccacacatcagtgcatatgaagtgtacacacatgcaaggcaggcggaggtgttgggatggggagcagtaaggagacggattccagtggagctctgagctgagtcccaggctgcattcctcaggcagttctcatgcaggctgtgattgacagctgctgccgtgtcgtctttgttccttgggccatgagtcttaatctacccctactgatcacttgtgcctgcttatgaaattgcccaggaatgtggttccagtaggcctgggacacaagctttgctcgttagtcttccaagccatagctgtttccttacatttacatcatccctacagaattcctattgtaaaaatgttaataataaattctattcaaattgttgaaattgttttacccctcttcacagccaacctatagaggaaagtcaactgcatggctgggaaggaaagaatacttaggtcaatacttacttatttaccattcaattagagtttaggagagaaggcttctgatgtgcacttgagtcaaagccctcaatgggtgctggaccagacacaggccttttcgaggagctgcaagtcatttggaactctcagcacatgctggagggaagcaggagtggtgcttccagatttagacagatagatgatgctggggggaaagctggattggaaaagggagagttttgtactcaggctaaactagatgtgccttttagatagcagagtagcagtgtctagtcatcatttggatatatgggactagagcatgaatttgtggtagagatgcagagtgaagagtaatagcagctgttcaaatgcagagtaagtgtgtagaataaaattggacaagccaggcatggtgggttcatacttttagtcccagctacttgggaggctgagctgggggggattacttgagcccagtagtttgagtccagcctaggccacatggtgagaacccatatcttgagaaaagaaaacataaagccaggtgtggtggttcgcccttataatcccagcactgtgggaggccacgacaagaggattgcttgagcttaggagttctagaatagacttggcaataaggtgaggccccatctctacaaaaaaagaaagaaattagccagccattatggcacatgcctgtggccccaggtacatggtagactgaggcagggagattacttgagccaggaggtggagactgcagtgaatcatgatcatgccactgcactgcagctcgggcaacaaagttagaccctgtcttaaaaaaggtaaagaaaattgagagacgataggtctgtaaggacttatagtgagtaaaggacaggcccccagaggagtagctgctagaatgggaggaggaaaagcaggaaaggataataaaagagttaaaagatgctgtggtcacagtgctgaatgctgccgagaagtgactcattccataaacactcactggatactgactctgtgtcactcttctaagtgctggggtagaagggaggacaggttgaatacagttcttgcctttatgagcttatgttctagtgagacacaagtagtttttcaggtagtgtcaaatagcaggaagaggaagctggataaagggattcagagtgtcggggtgctcagtactttagatagaatgataaggaagagtctctctagagagccaacatttgaacagtgacctgcccaaagcaacgaagggaaggagtgctggcattacaggcagcagagacaggaatgtgtttcacatgtgttcacagaacaaacagcaaggtgaccagtgtggtcagagtgaggaataagggaagcagtggagataaggccacacaggcagggccacagctcacagggccttttggcttcaggccataggaagatgttaaggttttattccagtttgataggggactcatgtagatcttgagcagggaagtgagtgctgttaataaagaggttatggtgactgctttggggaaagtaggccatggttgggaggcagattggaggcagagaagagggctaaaaagcaattagagtgatacaggtgagcaatgagagattgtggctcataatcaacccaggcagactaccagtgaaggcagacataacaggcattggagacattgcagaagggtaactcaaatgcaggtatttggccccagcagctaggcagatggcaatgtcctgtacaagattagaaaaggcttggggggttgactgttgggctggagacttccagtttgtaagtgtgaaggcaccagaaacctaggcaagagaagtgttggaagagtaatgtcagtggggcaggcagtgtacattaaggagagatggaagatgaggagctggcatgagggcatggtgctgtgagcaccaatgagatgacacagctggaggagtagtggggagtgagatgggaacaaaggaaacacagttagattggggaaaatcgctagtagagaggcacaaaatcttcaaaaagaggtgattgtaggaacagtgttctgcaaaagtggaatgggatcaactgcactgagaaaagttggcatcagtggggaaaacatttctacatctgagctgatgatcataaccttcagacaagaaataaactcgtataaaataaactttttccctttgttttgacataaagagttcaggtagctcgcagacatactcttctgcagagcaccctctgaggtaacacctcctcacagctcacctttaatctttactcagctgttcactttgcccaattctttgtaaagcagatgtttgataaatgtaaactatcaaacatgtgctaattcatgagattgtctcacaaactactcggcaggcttagaggaatcccagggatgcagaaactggcagctgtttccacctttaaaccaacagaattgactaagttgcaggatgtaagagagaataaattttcatgaagtgatcatgaagatgggaaaataggggctgagaggagggccattcttttatacacatgtgttttttatcaagcaactgaatactgagaatgttttacaacccctgagacctgcacctgccatgctgctctgcacagcggccactgggaggctctcttgaccagcagttttttaagctagcaccacaaaagggttagtgtttgtgaaaaggagattaacatttgctcactatcacatgggttttatatattcaagcttgacatgcctgtagaatttctatctacctcccagctaagtatgagacattacatttggtaggcacttgagtatttcctgaacaacttcaatccacactggtccttagtgtgtgctgccttttatgagtgtgaagatgatgacactgcctctcttcatggtggccttggctgacatatgcaggcattcttgtcaccgaaattgggctggaaattcccataggcagagtaggcagcagaagtatctgacctatgattgtaatgtggtctcttgctttgcctgaccaagcaaagtatgtagagcataagaataaaagacactttctggtcaaaaccagaagaaatctgtcattcaaaagagttcttatcagagcacttaaagtgaactaaatcaaaggccagtgctctattttgcatatttacatagaaagactcttaagttatgtggagatagacctttgcccgaccaactggaagagattgtcatgggagccattcttctcacctccaaagtttggaaagatgtgactatatggaatagggaatactgcaggctctttgtgaacactagcattaaagacatgtgagtttctaaggtttttgtgaactttctaaccattttcattaccttatttgctcccataaatgtaacactttaagacatatttttaaaggctacagtgtgcagataaggaaaacacataaaaccacatacttctttatatccagctttagtataaaagttcatatcttttcactgttaatgggtaggtcttggtgagttactgttgtaataatctgctctgctcatacatggaaaagtatttttctggtggtttttggcaaatacttcacaagtgcactaccagaacaccatagcacagtaaatatctttatggctttttagaagctgtctgtaagttccagtctctttttaagggacacatgtctggctgttgaaataattggccactcttaaggtctagggcctctggactatggagaagttatagcctcagcctcagtcacacattgtgtatttgcttttgctgatgttttctcccttatatttaaatgtctgtttttttatagaaaacttgagatgcagaatagccacagatccctgtgccctccccattaggagtgttgcatgtgtttagaaattgggttgatgagtttgctgctccagtgtttccttgaggcagtatgcaaaaaattgcccaggcatcacacaatgcccaccacactcaagaggctcctggggcactcatacaaccacagcagcaatctgtgggacttgagttaccaaggagagtgcgagaaatcttgctgagtcatggggttgctcatagacggtgccaacatgatactgaaacatgggcttcatgggggctttcttccagtctggccttacgactgttgtaaagggaagagccttggagcttgtaagcagggtgagctagggaagcatttccaccaaacactctagtaatgtccacaggacagtgagaatagctatatgggtgacacttaagaaaatataaagggacacctgttgctgtcgttgagcagcatatgaagaacaatatcatgacaggcagtggcaagagtttgtttttttacatttgcccgttactccagataagactgccatccagaatgtatgtgatcacaaaagtagagcttgatggctgattagaagtctctgccaattgttctcctcataagaataacaaattgagtaactatctaaataaaaaacacctttattagaactaaaaatagctaaataattatagtacctggtttaaactttgtatcactgaaaaaggcagtgaacacggtaggaaagacagtcttgagttgctgatgccagccctcccttatgtcctagcattggccatgtgacaagaagagaatctgcatgcttggggaagggagagcacagcagtgtgagactttgcattgaactcagtgctgcgttgtcatagcagaaagcaaaactgggctgaactcagccagtgcccacccacggatggaacatttctagccctagcctgaagggaatcacccatcccagtggctgaaaactgagttgtggaaagcctcactgctgtgggataaagtattctggggtccttaataaacttgaaagactgtctaggccacaaggaccgcaactcttaggcaagtctgagtgttgtgctgggcttggagccggtgtatttggggggcatgtgacctagagagacagcagatggggcagcccagggagtgctgtaccacccctccttcaatcttaggcagtgtagctcacagctctgacagagacctctttcttctgcttgagaagagtaaagagtaaagaggactttgtcttgcaacttggatactagctcagccacagtaggagagggcactggtcagagtcatgaggctcccattttgggtcctagcttttggataatacctctagacaaaccctgggccagaagggaacctgctgccttgaagggaaggaatcagtaagggcaggattcatcactttctgactaaagagctcttggaccctgaataatcagcagtggtaagcaggtagtacatgtcatgggtctttagtgagcctcagagatctgctggcttcatgtgtgacccagcacattccaaactgtggtggttatgaggagagacaacttctgcttgagaaaatctgagggaagagtacagaggactttgtcttgagcttagacaccagagcagccacagtggagaaaagcaccaagtgggctgttggggtccctgattcaggccttggctcttggatggcatctctgggctttccctgggccagaagggagcccactgctctgacgagtgagttccaggccaggcagcattcaccacaagctgactgagagcccttgggccttagtgaacatcagtggtgacctggcagtacaccccaggggattgtgatgctggtgaacatggggacagactactctgcctgggtaatggggaaggaagagtggaaaggtgtttgatggttttagtgccagctcagtcacagtaaaacagagcaccaggtggatttctaaggtttataaccccagccctagcccccagacagcacctctgaacccatccaggggccgggggaacttactacacttaagtgaaggacagaaggttctctggcttcactacctgctaattgtagagccttggggcttactgcaaaatagctggcagccagggagttgttacagtagaggccttgggcagtaacagtgctgtgtgggcttcagatcagacccagtgctgtcctaggtgtagtggccacaggggtgcttgtatcactcatcttcgaactccagaaagctcagcacagagagactctttttgtttgggggaaagtaagagaagaaatgagtctctggctgctaatgcagagaattcttccagatcaaatccgagatcactaatgtgctacctctacatatctgcaagaaccaatgacattcttcatagacatagaaatagaaaagacaatcctaaaatttatatggaaccacgaaagacacagaatattcaaagctattctcaggaaaaaacgaaaaaaacaaaacagaaggagtcacattgtttgaatagaaatgatactctacaactatagtaaccagaacagcatggcactggcatgagaacagacacatagaccaatgagacagaagagaaaactcagaaacaaatccataagtccacagtgaactcactttcaacaaagatgccaataatacacaatggggaaaggatggtgtcttcaataaatggtgctggggaaactggatatccatatgcagaagaatgaaactagtttttctcatcttatacaaaaatcaaatcaaaatgcattgaagatttaaatttaagacctcaaactatgaaactaaaataagagattaggaatattcttgaagacattggactggaaaaagattttttaatactccataagcacaggcagccaaaacaaaaatgggcaaatgaagtcacatcaagttaaaaagcttatgcacagcaaaggaaacaacaaagtgaagagacaacccacagactgggaaaagatatttgcaaactatctggattaattaccagaatatatgagaagtgcaaacaactctgtaggaaaaaaactaataatctgatttaaaaatgggcaaaagatctgaataaacatttctcaaaagaagacacattagctgctgatggaaaatgcttctggttcctgctacaagggaggcctggatgggaaaattacctgtgctcaggaggtcaaggctgtggtgagctgtgattgtgccactctccaacctgggtaatagggtgaggatctgtttcaaaactttaaaatatacatacaaatggcaaacagatatacgaaaagatactcaacattattaatcatcagaaattcaaaccaacactacagtgagacatccatctcacctcacttagaattacttttatccaaaagacacgcaataacaaacactggataggatatggggaaaagggaacagtcgtacactgttagtgggaatgtaaattagtacaacccctatggagaacagtttgggggtcttcaaaactaaaaatagagctacaatatgatccagcaatcccactgctggctatatacacaaaagaatggaactcagtatatcagagataagagatacctgcactctcatgtatgttgcagcactatttacaatagctaagatttagaagcatcccgagtgtccatcaacagatgagtggataaagaaaaggtacatgtacacaatggaatactattcagccttaaaaaataatgagattctgttatttgcaataacaacatggatggaaatggagtataatgaaatggagtattaactcattatgttaagtgaaataacccaggcacagaaagacaaacttcccatgttatcactttttatgggagctaaatgttgaaacaattttacttgtgcagatagagagtagaagaattgttaccagaggctggtaaaggtagtatgggggatggggagtaagaagtaattgttaatgggtacaaaaatgtatttagaataagatctagtatttgatagcgcaacagggtgactatagtcagtaattatttaattgtacatttaataataatgaaaagattataattagattatttgtaacacaaaggacaaatgtgtgatggatacttcatttaccttggtaggattagtacacatcgttggcctgtatcaaaatatcctatacaccctatgaatatataaagctataatgtatgcacaatttttaaaaaagactatcattcgtccaggctcggtggcttacgcctgtaatcccagcactttgggaggccgaggcaggcggatcatggggtcaggagatcgagaccatcctggctaacacagtcaaatcccatctctactaaaaatacaaaaaattagccgggcatggtggtggacacctgtagtcccagctgcttgggaggctgaggaaagccgtgaacccaggaggcggagcttgcagtgagccaagatctcaccactgcgctccagcctgggtgacagagcgagacttcatcccccgccccccccccccccccgccaaaaaaaggctatcattcagaattactacactgtgcataatatacaattgaagtgaggatgttgtgactaacaaaagactagtgactgttggttgctgttgaaatggctgttggtgaaaatgaccactttgctgatagtataaacgagtgatgatggtgatgttgctagtagccattttagcaaaagatgtgacagaaaattaatttgaaacagaagtactttgaaagttgcagacactaaactgactttgatcactactgtcatcagtctgcagactgatttctcaaaggaaacaaaatttgtcattatgaacacttagctttgctataattgcagctaaattattctcaaaacttgcaactaagctggctgagctctagttgtagttacaaggtcagggaatgtgcaagttctcacagacgtgagctccaggggcagtggtgtcagaggcctgctgtaagaaacccagttctacacaatgctgtttgtgaatgtggaagcatcagaagctatgctctgcaaaggctgcttttgtttatgatctttggaaactggaaagcattacaacaaagtgttgaatatacatttaccttgtctccctgctgttgattatgcataataatcttgttttgactgtaaattggaccatttaaaaatgagtgtctattgggtttttcttaaaactcttcaacatcttcatgtcttgttggaatatattttccttcaaaatatcagttaaactgagcagctgctcttaagaaaatgtgctgtgcctgtaaagggtatgctgttcagtcatttaaaaaaaataaacaaaaaaaactaagaagatccatatcctgtaggcctatgcttatcttcagtaactaaacctctattaataggtgtaataatttaataaaatattgtatttctacacagtcaaaatgtgttcatggaaaaatgtgagataatataaaacaaataaatacaaaagtcctgattagctgattattaaaacattgtctgatttacatttctatagccttacggtcatatgaacaggaaattgatgttggaaatagtttcagatgggttttcagttaaacagatgagaaaactacatctctgctcatattttaactgctcttccagagaacatcaaacatttgttgacttagccagtggataagatattaaaactttaaaaccaagaaactaaatatgttgttcaggtattgattgtttttatacaattaagtctttacagggattactgtgaaagtggttctatattattttatattcatttgtttaaacatttaacaagaagccaggtacactggctcacacctataattccagcacttttggaggccaaggtaagaggatcacttgagcacagaagtttgagaccagcttgggcaacaaagaccctgtctttaattgaatttttcctttaaattagcccagctcagtggcatgagcctgtagtcgcagtgacttgaaaggcttaggtaaatggattgcttgagcccgggagtttgaggctggtgttagctaggatcatgtcactgcactttagcctaagtgacagactgagaccctgtttcttaacaaaaaaaaaaaataggcaagggcagctctatgatcatgtgacagaaggctgttctcagcctttatctctcccactgccttcaactcatcccccacattctgttctgtctgtgggtgacagaagctgagcaccttagggttttatttccagctcaggagaaacactgagtaagtccagtgccctgccagaagtcatatcataaagtgagtttagtctagccaagatgtctctctttaatctctctgccttccagtgtttaaagagtattcctgtcctgtctagtgacagtttctcaccttcataatttcaaggtgagtagaaactggcgttatgccctttgacatagcctcatgcactgaggcagaggggagggattccctttcccatcaaatgtagcttatgtatgtatttgagaccaatccttgttgttttggagtttttcctcctcagaaataacagggtggctctccatggatccatttgttgccatggtgttgtacccatggcttttgttggtgttttttgacttcagtaagcctctttttgttatccttgtgaaaaagtctgcaagttcttcagagctaataaatggcattcatcattcctgtcatctgatcactgttgtggggccttgtgagtgagcatggagtctgagctgtgcacctgcactaagggaactctcaagaatgagccccgagtcagcagcacatatgcatgagaggtggtcacctttctccccatcccagagtcagggtgctggatgcagaagggactgcaagcaactgtgccttgtttggacattagcataggaatccaactgggtagcctttatttgtttcaaaacagaatttagagacatcctagtagctcagaattatatttttaaatgaatagaaataaattttattaaatgacaacagaaaaaaaccactacatgtttagtacatgaactaaacttatgtagtattgtttgaagggtatctacaaaattctcaccctaatgttttcttgcaaaagaagtgaaaatataaagtgaagagacattctgtaacaaggaaccactgagaaacacaaaatatttaaaagtcatataaaatttatgtgcatttttgaggattataaaataatcagttggcatcagacttttcattttagcaacatttatagaattattttctagtgggagttttcacacaacttttgaaaaatatgttaaaattgaaaactttcttgtattttgtaaactactgaggttccaattcagggtgctttttttatatttataaggtccatctctacagcatgtaatatcatgggtctttgagtgaatatcaactaaaggcattctgacattctgtacattcataggttttacctcagaaatgagttttttcttgtcttcaggtggaactggaacgagtaaaacactaccatatgtttgtatttataaggcttttcttcattgaacccttttatgttttcaaagagaaatgacaaaaaccgaaggctttaccatgtttcttaaaattttgtggtttttctccattttaaatcctaaaatgtctttaaaagcaagtgggaaaatcaagtttattatcacatgttttacatttatgcttttcccccagtatgagtttttctaagttttcaaagagaactgagaaaattccaggctttcccatatttattacataatagggtttctctctagtgtgtgctttttcatgtgttcttaaagaactagaacttataattgctttatcacatttcttacatcagaataatgtttttgaagatagcccagtggactaacattgtcccatgttggttttcttgtgtttctcctcccacaggaatgagcttgaaagacagtttttgcagctaattgactataacgtcgaagtttctggaagtgtttatgccaagtactattttgatcttcgatccttggcaaaggacaatagcttgcattttccagtttatcttctcaacaaagaaagggcacagaacctggaagtaaggcgataaagtcactaaggggggttttctgtcaaccaccaaagccaacatctgtgactagattagattaagtagtgatgagaaaaatgaaaagctccaaaattaacttacatactgaagagcttatttcctgtatcatttatggtttatacaagaatccacattatttaaatattatagatctcttctgtgaccataattcagaatatttttaaccaaatttaattcagtcttagtggtattctttttgaatctttgccctttcaagtaagcatacatgaataatttcttgcaattctattttaaatgatatctgcatatgtaatgcacttaccacttttgcctgttttttattacttagtttgcaaatttatgtcattttttattgtatatattacagtgcagccagttccataaatttgttaggcaaagcattagtgcttaagccaagagacctacacttagtctgtataaggtatgagcgtctcaggtagtgatgcaagaagtacatgtgttttactggaaatggtaacttttggggggcaaagcaatatttatggtttgtgacttctggtttcagttgtgagcaaagttgcaactgaaatggatgcatatttataattagtactttctgtggtaccttagaagtactttagaataacataccttctaccataattaatgtgccaggttctgccttttgctgctttagtcgttcgacctctttgatgttccagtgcactcctgcacacatctgcttcattcaaatttgctttgaggatataataactactgcagatggggtagactctgaatagattaataaactataaattttcctttgctccagcaatctaatcatagcccttaaaggagattaccttagtgaggtggcagggagtagcatccccggaacctggcagtgcgaacctcagccaaaggagctgtaactgtgaactatctaaaggagcgtctgcatgtctggcttatcatcaatggtgcttgttaaaaggctggagccctttttaaaattgtacctcttttctgtttcatttactttcttaggctatttcaaggatggaagacgccaaaatcttttatagtgaaggtccttcagcgctgataatttcattaatcttcagcgctctaaagccattaactcttgaaggaagaaatgaggggctatatcatgtgaacccctcatcaaaaaagttcggaaaatattacctctcatgctcaacaactagaaaagttagtattttcaaaagaagaaaaatctcaaagttgagaggcttgtgggcaactaggattgcactccacaggaaaaaaatgggatcgttgcagtgcaacaactctcgtacactcttctgtctttttaaacgtaaacaggtataaaaactactccaaagtgaagacttcttgcccatacatagatatctttttctgtgtgtggactaatagctgtgaactatgtaagggttttaaaacaatagtttaaatttttagatttcagacataattttctgtttcttttctatttttcttttcccccaatattgctgcagacacatttaaaataaatgcagtattactattaaaacatgggactgtaataactcatgaagccactagaagcagaccgctcattttcaggtgttgaagggttctacctgcctacttttaccatcggagctgctcgtcactggcaatcattttaaacaaaagctgatggagttcatttgccattcatatcttttgtaagcattacttgctagcattttagcatgtttggggtcacaaaagaaaaactattagttattggttacctacttgtattagggtccatggtatgtttcttataaactataatgatccttttgtgtgtgtgtgtgaattttatttatttatttacttattttttatttgctgataaattttcttatttgttaaataaatgtattgagagatattttcataatgccaaaccacatgatgatccagtggtgatataaaaataataataagtgatgtgatctgaaagtttcagggcagattctagttttaatgtagtgtgcttagaccctccagtgcacggcagcttatgtatatatgctataaacctttataaaataccgttcaaaagtttcatagtatttattttttcttttttataaaagatggggtcttactatgttgcccaggctagagtgtaatggctattcagaggcacaatcatgactccacagcctggaaattctggcctcaagcaatcctcccatgtcagcctaccaagtagctaggactataggtgtagtaccaccacctctggttttattttgcaaaaactgaatattaagcttttaactttttgtttcagtcaatatctgctgtctccaagaaacgctgaaacaaaaaattaaaagcttaatatttaggagctgggcatgcctgtagttccagctactcatgagtcttaagtgggagaatcacttgaggcctagcattggaggcagcagtgctctatgattgtgcctgtaaatagccattgcactacagccttggcaacatagtgagaccctatgcctttaaagaattgcaaaactaaatacatgtataagcaatataataaactttccaatgatgttttgtaaatgtttgtagcactgatacttgtacaagtatcaaagcttaaaattacactaagacttttggaattcttgtatttttataaagtgccctcttctcttttaaagtagttcttagcagggctgttatctacgttgatcacctaaaattattttccctacatgtggtaaaggaagaatatgatcagtgttaatttacatgtaacagattagaaggaattggaccctaatagtagcaggtgattaaacattttattatcccacctgttagcctggctacaggtattatatttcatgtcctgctgtttacaaaaaagaacttccataaaccttagaaatcttacttcctcaaaaattattgtttatggagtttagagcttggagatttaagtatttattgcagttttattttcaaatgataaatgctatctataatttatgtggtttttatttctcatgtttacattaaaataaaacctgataaactgttttaattaaaatgtgaccaatgtgttcataacacttgtaattacattatgttacatatctgcctaacttacatggtttaagtcagtcttgatatgtccgaagacattttgataagttgctttcaccgttcataagttggtttgattcatgcctctgtttaagatgtaatatttgttttctctctcttaagctcttttcaaagtgaagataatttgttacacttaaaatcactgtccagccacagtacttagtggcatagtgcattagatggcatctttgaataaatggttattgtgcctgtgagaaaaaagcataatatgcttattaggatataaaattatgtaaatatacaaaagagaaaggatttccagaaatagtacagaattagaacaagaggtgtttgaagtattcaattacacagaaaaaaaattggaagtacaaaaagtagaattagtgttgctgtacagagggtgacaaaccacataatttgactttcgcacactgttttcaagcttacattttagttaaaaatatatcaaatcagttaggttgttttttagaactaagagtctagccactcagcttcagtgattctcactaaatctttaattctttagtacctaaggtaaaattttaaataacttatcaccttatcttgataaagtgctgactaaaatcaatgatctcatttaacttaaaagaaaatatttataaattactgtttataagaaagtttgcagcatataatatgacaataagcagaaatcctgacatatatgagtggtcaaaggttcaaaaaacagtttgggagagaagaactggacatgaatttgtgacttcaggagtaagtcagtagaataaaaatcagtaacattgctctcccctttggcttgaattctagaaggcaacacagtcattttgataattgggaaattgggtcaacttaggataagaatataaatgtcactgaaagtgggtaggttttctgacaaatgttatgtgagaatgtgaggtggcagggccccagaacctggcagtgtgaacctcagccaaagtagctggaactgtgaactatctaaaagagtctgcatgtgtggcttatcatccgtgctgagcatggaaaccaagctgctagtacagtggcaactatggcagttttcttatagtttgatatctaggaaatatttcaactgttgtaatacagccaccagtgaaattttaactccagtatattgtgaactgaacttttacatcattacaaggaaaagacaaagatttgaaatatacatttgaaccaagtgaaattgccattcttataagtcaaaaatggttgtctaatggcaatttcatgtggttcaccctaaggtgactgcttagagctcagtgtttctggagaaatcttatcccggccctttccttcacatttcctctttatgtaaccaatatgcccacatgttattaaaatccaacaacactaaatcccaattttatcacaattcaaggttcatttttgacctagtttttttacatttctaaatactctatttcttgatttaaaaaaaaatgccaaagccaattttaaccaaaaatcaaatcattctttgttctgtattcagctcatgcagtgtttctggaaactagtttagctgcagtatgcaagttagcttgaatttttcgtcagcaaaggcttctccctaagcacatttaagatgactgtggcctgactgttccttcacacagcattgttgaatatgaaactacttggaaaatgatttcacagacggcagagaaatctcccaggtaagtgctagtttctacgcaggatctgtagagtacgcccagaatctatcaagttaaggattaaacttaaatctactcaacagccacttccagacctgattgggcctgacattgtgccagcaggcaaggcaaaagatgtaggagcccttcagtgaagtctgcacccctataacacaagtttctaaggcaatttccattcaactattttaaatgtgttcggcaagtgtcagaacatgcacttaatgtgaaataaattttaagaatatcagcttgtggtttaggatctccagggtacaagaagaaaaactaactgggaaagtgaaatagaataaaaattatgagaatcttgagtccaatgaaataacgttaatattctttaaagaggaacaggttaggtgattcttacaactgctgtaagggagctaagcaattttaatgtgattaggaaaattcagtgatagtaccagaatttaaggtctttaataaaataccagtagtatcttcttcaaaagacctccactgattctcaaattaggctgctaccttcttgtaagaaaaatcgctttgtcttttccaccttgtctattctacaaactcttacctgtcagcccaagctggtggctcctgtgtctccttggtgtgataactgactcttccacaggtagagcttcaagtgtttttccaccttctctttcaccagctgcttcacccaagacccttaggaccctctttaaacaaaattcttccagcgttatccttgctttttctgcaatgtttgatgttggtcattatgacccactgccaaagcattattagcaccggattccagagcatgcaggctgtatgtggcttacagactaactgaccccttgtaactccctttcatcacttatgtgaatcctgtgttctccaaagcagctcttcccaacttgctgcacttacctattctcctgacctactcacaaccctcgtcatgtattctcaatctagactgaggttgaggttgcacccccaccttccaaaaccaactatttcctctggcatgaaattccttgttctgaaggtaaccccctcccatctaatggaaagcattccacttctaactctaaaattaaccttttatttacacctgctccatcaattatcttccttaaaattgcacttacctccccaacttggggaggtagcaattttggtttggttctctgaatgtctgagtgttttctcaaaatgtggtcctcagctcccctgcctctcttccactgaaagagcttatgaaaaatgaagattttctaagtccagtgtggtatcctggatttgatcctggaacagataaagaacttgagtgggaaatctgatgacgtctggagttaagagtaatgtgtcaacactgactttagttttaacaaatgtgccatgttaataagatgttcggatgttcgcattaggggaaaactggcaatggtattcagaaactctgagttattttggcgactttttgtaaatttacttttataaaatggcctcttgggccccagaactactgagtctcaatgcctggggctgaggcctgggaatctaaatttttaagaggcaacctaaatgattgttatacagcctcaaattttaaatcctcctcttctcaattccctttaattccatgtctgaacagttgcttctcccttgtttcacctacctaacttaacctgagttaatctgttaaaccttctgaattctatgatgtaagtactattattatctgttttttccctgatgagaaagctgaaatagtaggagctgaggcatccaggatcacactgctcagaaaaggtggagctgggacttgaattcccaatcagcccggctcccaagtctatgttcataaccactctccatcaaccctatttctatccacagtgagctaaaaagctctgtaggtaaagcactaaaagcagcattattgccaataatattatcctaggcctacctatttctgtaactttctaagtccaacaaacagtctttctgcttcagcatacagactttgcctcccctgcttttccactggggatgaatgagcaatgagaaagcatggggaagatgtgctgactgtaaagtcctgaacatggaagggacagttgctcttctcttaggattcagctcaactattatattttctaatctgcctctcccaactgccttatgtaccaattgaatgaagtgacagcacccacccatgtcacccaccttgacatagaattccatgctcccatattgctaattcacctcttcctggatttatgttgcctcccccaaacattttaatctcctaattactcacatagttgtgtctcccacacacttatgtctgggatcattgatggagaatgtggatataccaggcattaaaatgaggtggcatttggtagattggtggctaatctttattttgccaaagagaaatcagcagaaggtggtctgacagtactctcaggctcactaagcatccttctagattttaagggagaaatctactttcaatcagtttctacgttctcatctgggctccctgactttagagtttgacagcaaattatggatacaactgctgaattaaaaagctgtagaagtttctgtcctccagccagacacacaaaagagcaccatgtctattcagatgatttcagtgtaaatgaagggctcataaaatagaaggcaatctcaggaaataactttttttcatgtccctctttatttcttcaaatgaataattaagattggcaggagaaacctaggaagtattttcgattaaaacatgttttaattagttctgcttctggtgattagaatttgcttaattttacttgtttataaaatttttctgcttatatttaagtacatctgaaaaatctgattataaagttaaaatctacatctctccccagatattctttaaaagaagtgtatttcttcatagaaacatgacgagaaaaagacttccatggcatctttttattttcttcactattgctttaatgcattttaaaattaatctatattaattgagaataaaggaacaaaaagactttttgtcataactagtctttatatttgatttttaaaaaagctcaaactgttattttttccttactacaaacagaatacatacaaaaatttttgcaataacagtatcaactaattaaacattttgagactaacataaccacatagtcattctactgactccgaggaacaaaaaattcctaatcaagatgctctgggttttgttgttgttgttattgttagtattcagatttataattatcatctgccagtaaaaatttaagtgttcaaagttgattatctacaaatacatcactggctctgacatgtaagttctggagttagcatgacagtgactacactgcatgggatgggtacgatacatgtatagaaatcataaagagcattgaatgcctggacttgaaccgttgacttggtatgtgcttcatttggctcactaataaatccacctgtaccaacctcatatcaaaagtcacaaaatatttcatctatatcatatatactctgtagatacacacccatctacaaagcatatatactatacattcagtttttagaaacatgaagtcatattgttttatggttttgttttattttgttttgtttttgagacagggtcttgctctgtcacccaggctggagtgcagtggcatgatcatggctcactgcagccttgacctcccagggtcaaacaatcctcttatctcagcgtcccaagtagctttgactacaggtgcacaccaccatgcccagctaattttttttatttttagtagagacagggtttcgctatgttgcttaggctatgaagtcacattgttgtaaaatgatataccacagatgaacattaatctggctaaaataaatattgtaattgtcatcaagctactagaaacttttgggagttttgagtcaggtgagttacttcccacctgcctaccctcatgcttctgtaatgtcttggtagtctgttcatacaaaaccatttccccttaatgcagttaagatttcttttccaggatgacctgattgggttttggagaaaaaaggggtcatgcagaagaggcaggcatctctcagccactttccctcacacctgctgagatgagtgctgttttctgtctcattggacacatttgggttagaaagcagttattcaaagttctgtgtctgctactccctttggtctttctgtagagcacaaaagtgaaagaagctcctttggcaagaatagccgttttattaaaatgtaactgcatgtcctagctctaaggtttccattctctactggagagtgcaggtcatggatgctgttattgaggtttggtgtgtgacaaaacaggacgaaacagcctaaagaatgctaactttgaaatagtgccgtgggcatgttatttaaagcttgtacatgcatcagttacaccacacacccaggaccagttcactggcaatgatcacgtgaaaatatgacaaaagtttgcaaacacataccaataaggcaccaagaaaaaatatttccagttaatttcagttaattcccagttaacttcaaaatatgaggttgtaccagactcagctgcttaccacttaaaagccagacatgagaggtgagggttggtggaaggaaaagcaggtttaatcagaggcagcaaaccccaaggatggcaaactagctttctaaaataccatcacagatttttaaatattaccatagggtttttaaagaaaaacttgctatgggagacatgtgggagccgtgtggagtgcagcatctgtgtctttgttgcgatggctgtcagggttaatcacccaactggaggcctggttggtgttatcttgactttggccttaatgtgatggactaattgtgactccccctaagcaggagaatttcacagggactccatgccttacttgttctaagattaccttctgacatttcttaagcaagaacataattagataagcttggagggtactctagagagggaaggaatagaggggtgagagggagaaaaggaagaaaaataagaggatgattaaaaagaatttttagaacagtttcccaattacaatgggtgaaattaaaaaaaaaaaaagactcctgaaaatctggtcaactgattcactgagagttcccattactttctttagataacctatttgaattctcatccccttgtctacgaagtgagacattgctgagaatcacgctgtgaaagtgacagccctcaagctgtccatatgaaactccactgtgtctaagtctgtccccacttttacaaagctagctgtaaaggagttgctgtaccaccccataaccttttattttacaagtatttttatgagtaaaactagttttcataatcaaatgcaaattatatggatggaaatgggggtggctgtaaatccagcttctcttccctagggaggctgatggtagacttcagggaagcagatggcctttatctttgtgtctttcagggaatgagggaatagagggatagcagggatgagaattttctttaagtgcctctgaaagttagtctggaactagatcccaaagaccatgatttatactgcctgcccttggggttagcatgttttctaaaactgtcttatttctgagtgaattaattgttgttaggtttagcatgttgccaaaattttttttaaaaatctaaaaataaataaatcagttttatctacttcattccacagtattagggaaccgtgcatcatttctagatttctccacaaagaaaagagggaacacccaaattaggcagcataactgaaggaggcagggcagtctacatacattgtgggaatacatactagacgaggggaaagttcaaggtgaccagagattctcatctgaaaaacagaagaggaactgttgcccagacaggcaatctgtttcaaaatacgagtaaggggcttcttcctcgaagaataaataagataggctaaagttctgtagctatgtgtagtaggttttgttgtggccactgaaattttaattatgattcagaggatgagttgtgtaagagcaggcatatatatacatatatatatatataaatgttaagagcttttgagagtccttaaaactatagtactaactttttccctcaacccccgctgttccccataaaaaatgttcaaattgcctgtggaaagtatacatttatctactcaatatccacaaagtaaaaattgacctaggcttaaacattacttttccaattttggtgtaaattaaatccaaatgcctagactccaggtgtttttccaggtaggtttcctcaaatgttaattgcagtagcaattttatctttctaaatttagcactcactcaatcttggtcattggtattttgcttgctgatgcactgccactctcttgtccagtaatcacctcaaatccttcatgaatgaatgcttaaacaaattttttaaaaaattctaatagcaaagaaatctctgtttgtgtctatgtgtgtgtgtgtatcattatataggctttcaaatatgaatgaaggaatggttgaacagtttagtaaagcaaaccaaattatctaatagcaaagaagttctctgtgtgtgtgtgtgtgtgtgtgtgtatgtgtgtgtgtgtgtgtgtatgtgtgtgtgtgtgtatgtgtgtgctcatcaaaacacaggctttctcagaaggaaagaaacagtgtagtgctagaggtagcactacactacctttgcagcattaacataaacacagaccttaagtctgataagaaacatttacaatgtattctctctgaggcctgcttattgaggcttcctctgcctaataaaaccttggtctctgcaatcccttattggaactcagacattccttactactaataatacctctttcaacaaattgccaatcagaaaatttttaaatctacctaggacctaaaagcaccccctcccccaccactttgactcatcccatccttccagattgaatcaatgttaatcttacatgtattgatggatgtattctgcctcccttgaatgtataaaagcaagctatggcccggcacagtggctcacgcctgtaatcccagcactttgggaggccgaggcaggcagatcacgaggtcaggaaatcgagaccatcctggctaacacggtgaaacccccgtctctactaaaaatacaaaaaatagccagatgtggtggcaggtgcctgtagccagctactcaggaggctgaagcaggagaatggcgtgaacccaggaggcggagcttgcagtgaactgagatggcacaactacactcaagcctgggtgacagagcgagactgtttatcaggccctcccgaagttgttgcatggatgcatcctttaagtctgcagaggtttctgctgccttttgttcggctatgccctgcccccagaggtggagtctacagaggcaggcaggcctccttgagttgtggtgggatacacccagttcaagctcccaggcagctttgtttacctactcaagcctcagcaatggcaggttcccctccctcaggctcgctgccgccttgcagttggatctcagactgctgtgctagcaatgagagaggctccgtggtgcgcatccttaactttggcaaaataaagtttctcaattgattgagacctgtctcagatactttttgctttacaagttggtaaccatagaggattctgagtggaggtgtccctgacctttgacaaatctatcaatgcttggtaccagtttgagctatctccccactccagagaatttttgatttcccaaaatttggtcaagatctgaagtttattttgctgtacaacttcttttctggagttttacttgcttccaaaaagggaagacaagttttctgcttctgtgacaaaaaagtgcaggcaactacttcctggaatttcagctcgctttcaacaaagaaggtgagttgtttcttcctgcttctaggaaaagattaacaaccagctggccttaatttctccttaccattagagtgctcagtaatcatattgttgggtttgtttgttgtcgtggtctttctcccatcatatttgaccaactctacctagtttactcaaatcattcttattctatgaagccagcatcattttggtaataaaaatctgccaaagacatacacacacacacacataaaattcaatgttctgattaacatagacgcaaaaatcctcaacaaaatactagcaaacaaaatccagcaccaaattcaaaagttaattcaccatgattatgtaggctttatatcttggatacaggactggctcaacatatgcaaataaataaacagaatttgccacataaacagaattaaaaacaaaaaatgatcgttttgatagatgcagcaagaacttttgataaatttcaacatcccttatgataaaaaccctcaacaaactaggcgtcaaagaaatatgactcaaactaataagaactttctatggcaaacccacaactaacatcgtactgatgggcaaaagctcaaattatttcttttgataactggaacaagaattcatactctcacaacttcttttaaacatagtgctagaagtctaagctagagcagtcatcaagagaaataaataaaaggcatccaaagtgaaaaaggggaagtcaaattatttctgtttgcagatgactctgtattctgggttctctattctgttccattggtctttgtgtctttttaaaattccagtagcataccgttttgttaactataaccttatagtaaagcttgaaatcaagaagtgtgctgccttctgctttcttctcttcctcaagtttgccctatttggagtcttttgtgacttcatacaaagattgtttttctatatttgtgaaaaattccattggaattttggtaaagattagattcaatctgtagatcactttgggtggtatagacattttaacactaacaagttttcaaatttgtaaacataagatacacaccatttatttatgtttttcttaagatttttatctctgttttatagttttcaatgtacaaatctttcacctcctcggataaatttattcatatgtattctttctgatgctattgtctttggattgttttcttaatttattttggatagtttgttatttgtgtatagaaaaacaagttatgtttgttaatcacgtttacattaatgttttatgtgattattctgtaagtttattgaacttatttattagtcttaatagtttttggtggagttgtaacatttttctatgtttattattatgacatctgcaaacagagaaaattttacttcttcctttccagttttttgctatttaattctttttattgcctaattgctctggtcaggaattgacatactaagttaaatagaatggttgagagtgtgcattcttgaccagttccagctcttcacggaaattctttcaccttattcccattcagtatgatgttggctatggtttgttgtatgtgtcttttattatttggagatatatttcttctatgctaatttgttaagattatttttaatcatgaaggggtattagattttatcaaatactttttctgcagctattgggataatcatatgattttgtttttaattttgtttatgtggtgaatcacatttattgatttggatatggtaagccatcttgaatccctgagataaaacccacttgattataatatattatatttttgatgtgctgttgaatttggtttgctaattttgttgaggatctttggatttttgttcatcaaagatactggtctgtagtttttgttgttgtgttcttgcctgatgttgatattacagcaatactggttgcatagaatgagttgaggaagaatctctcttcctcaattttctggaatagtttctgcaaaatagtttcagctcttctctgtatatctggaaaaatttatgaatctgcctggttttgttttttgttgttgggagattttttttctactgattaaatttcattaaatgttattggtatgtttaggatttgtttcttcctggtttatttttgaggttgtatgcttccagaatttattcacttcctttaggttttctagtttgtgtgcttagagatgctcacagtagtctttagtgatcttgtgtatttctgtggtatcaggtgtattgtcacctttatctttcctggttgtgtttatttgaattttctctttcttgtttagtgtagctagcaatctgtcaattttgtttatcttttcaagaaacaaacttgtcattttgttgatccttttatctttttttgttctcaatcccattggttttgctctgatctttgttctttcttttcatccactaggtttaggctttgtttgtttttgttttttaaactcgttgcagtgcaacattatgttgttaatttgagatattctgttgtcagtgttgtcagaagggcgttagtctcttattgtattactgtctatctcttttctatcagcatttgtttaataaatatgaatgtttcagtgttgggttcatatttagatagttatatcttattgttgaattgagccctttatcattatataataatctcctttgtctttttttactgctgttgatttaaagtctgttttatgtcatataagtatggctatttctgctcattttggttttccatttgtatgatatatcttttcccatcagttttctttgaggcttggttgtctttacctctaacatgcatctcttgtatgcagcaaatgtttgaatcttactttttctatacaatttgccactctgtatattttaattggaacatttaggccatttacattaaaaggtaatattgatatgtgagattctgttgttgttgtaatgttacctggttgttttgtagcaacagttgtagaattgctttataggatctgtgaactttttacttacgtgtgcttttatgatggcaaattttgctctttcatatttatctttagaactctttttagtatttcttgtaagtccagtctaatggtgacaaattcccttagcatttgcttttcttagcatttctccttcatttatgaagcttagtttagcaaaatgcaaaggttttggctggtagcagttgtcatgccatcagcacatcacccatcccatgtgaaggaaaataagacatgttgcataacatggcaatgtggaagttagtcatcatctcaatgcaagtaggtatgagtaactaaggcgccttgcacttgttcctaccagatttttttttatactttaagttctagggtaccatctcacaccagttagaatgtcgatcattaaaaagtcaggaaacaacaggtgctggagaggatgtggagaaataggaacacttttacgctgttggtgggactgtaaactagttcaaccattgtggaagacagtgtggggattcctcaaggatctagaactagaaatactatttgacctagccatcccattactgggtatatacccaaaggattataaatcatgctcctataaagacacatgcacacatatgtttattgcaagcacctaccagcagatttaatgtcattgcaatggaaggtgctggctctcacctgaattgtctgcttctacacttgatggtagtctgctgagaagcctgtttcttgccaagtgctctgtggctctaagagctggagattctttggtttcaaactttcctaagtccagtgcttctggttgagggtggctgctttcagtagcgtgtaggaactacattgcatagacaatcaccattgtttgtccaatcaccatttagccatccagtcagcctccagccacttatctaacaaatactaactgaatatggaatatggaactctttctaagacctcaaaaaactgctgttgacaaggaaagacaaaatctctatttttgcatagctgactttcaattatttagagccactatggttacatttttgaatgtcacaaaacaatttatcagagttacccaggttaaaaactaattgaggtggagaagaactctttgaggaggtggcattttagctgggacagaaggttgagaattcagctatgaggaaagtatgagagagtatattccaggtgacagggaccacaagaacaaagccatagggtcagaaggagcttgatgtctttgaaaaacaaaataaaggccatcgtggctgggttttagtcacatgaaatgaggtagaggaggagattgggaacaagtcttttagggccaaacaggccttggtaaggaatttggattttagtctcatttgaatgagaagtcatcagaggattttacgcaggaaagtgacttaacggaatgtgtattttaaaaagatgattctggatgcactgtggagaatggaagacaggaggatgtggatgaaaactgaggatggttttagtctttcagggcgaggcaacagtggactaaacgcttgtagtggtgatagagatggagagaggtggaataatttgagacacactacactgttttttttttcttttttttttctattatttttgcccaaatctgccattgctgcaactttgggatggaagtctctcagtgtagttcttccttcagtaaatcccccactaatatttcccagggccactctggaagaaggttttggtcagccatgcttttggtaaccagacagcatgcttggcactacagcttagccaggggtctctttcttattacctaaaactatccttattctttagaaactgccacatcaggagagccacctaaagcctttccccaactctaatcaaaccctggccatctccatctcctggttctatttttgctgcttggccaaattcttggggagtccaccaagattgaagccaccaagccttactggcttcaattcctaagacaagacaatgtcccgtttcccagttctagaaaaatgtgtgggattggtccatagtagactgacctatttaatatgcatggtcctgaagcagcctcgagggtcatgggatggcaaagttgtcatcttgagtcagctgtcaactgctcaagctggtgtgtacaggaaggagctgggcaccagacccacattgtctgagaccaacaggaggatgattcatcaaggcaaatcgaggtgctggcaccagcagaagggagaatagatggctggaagacaaatacaacatctctgaagtacctttcaagctgcgactcctaagctttctcttccaggaaccattctgaatctagactggttggagagcctggcttggtcacacagttgactttcttgtcaaggggaaatgcagacaaatgttgttagtgaccaggtctaatctttcagggaagtcttgcaagagcctaacccatggtccacaggtttctgtgcatgcactgtgaacaagcacccactggtaacgattgcatccagagttgtttcaaaaatttccaagaggaatctcagccctggaaaacaagaatgggtttgacccagagttgcctgcattggagataaactttggagaactccccttgttagcgtactaaaatccccacccagggagggaggagctcattcactttttttttttttttttttttttttgagatggggtcttgctctgtaacacaggctggagtgcaatggtgtggtctcggctcactgcaacctatgcctccccggttcaaatgattctcctgcctcagcctcccaagtagccaggactataggcacatgccaccacacccagctaatttttgtatttttagtaaatcgaggttgcattatgttggccaggctggtctctacaattcctgacctcatgatccgcctgcctcagcctcccaaagtgctgagattacaggcgtgagtcaccacacccagcccatttaccattttttatacatgcgaggtatgtggaacatgaccagtgacaccctttactccatctctacgattaatgactcagctagccagcccagtaaaagcccagctttcacctttgttctgggaggcactgcttaaaaactatccatgatgtcctccttacttgccacataaaatccccttgttgaacccgccttggctgtggtcattggacgtcacctgacaagccattgaacccacctgccatgtgggtaacaagatgaggaagagaaccttaagtgatgggtcagattgtctgactgacgatctgaagacctgatatgaagatattttttcaacacataattgtaggtgtctactctggaccaggagctgagcaaggtgcgtgaggcccaaaggtcattcacacccacatgaccttggaaagagcccgtgctcgcctcatggacagagtacagcacaggcacagacgggtgctcagtggaagttgtgagtaaataaatgacagcttagcacacgcattggtctggaagagacagtgaagttaagtgatgaattgaaaaagtgattaatagaaagcgctgctctcagagccctcgcaaatgctcttctcacagccatgcctctgatcagtcactgtaggctcttcctgcctacagaaatgaagcttggttgcttcacctgggaacacaccccagacagaggtccctcgtcattgctggcatcattccccctgcctggcatagcctcctggcctgtggaaatcctactcacttctcaagactcagctgcaggaagctttgttccctggaccaagttccactgcgttgactcctgcctgtgcgcttctgtgttcctgctgacaccccctgtcactctccctgccacctgcattacggaggacccagtgctcacctgcctctcacccaggatctcaagcacttgagagcagaggctggcctcctgcagccttgtccaagaccctcccacccaagacacagacgatgctctcaccaggtccccgctgggcttgactgctttattttactcttggaaacagcttcttaatgtgttggacataagtagccaagacaccaagggaggtcatggtctcttggcagaaaggcttccttgtgccatggctctcttaggcatagaaagctgtctcatcaaactcagtggcaaatctttttgcaactacctgttgccagcctattaattcagcagcaactcaatggcctgtagggtacttgctggctctgtcttgttgccactcatgctgagggcccaccatgggcaccaacatgccagttgtgggcaagacaggatgggagaccagagctgccactctccacagactctgttggtcactgtgtgggatagggagagtggagagggagggtaaagagtgtgtatggctcttctttcccactgcaatgctagtatctctgtaatttctgcagagttattagttgatgtgacattgctactttgtgtttactttaaaatgcccaaattagggtctgttgatgcagtctttcaaatgagattatgctggatatacggtagcagcaaatactcaggctctaatttgaaaaggcatcattatgggaaatattaatgagtgcttgttcttaatcagtatgggctgggctgaatggctctgcagaaagcttcctggattttagagttaagctcctggtctgttggggagagaatagggccaaggagaagctaaagaagagtacagctatgcttcagtgattcacttcactgttatttgattcattaaggttttactggggaaatgcttatcattgaggcttctgggaaaaaaaacattcaggtgattgatgaaatttcaaaaagtaaaagaagaataagatgaagacaatgacaccaggttttgcatccttgcttgcaggaggtctaaggtttcaactcacacactggatcttactgattgaaagcagcaaatatgccatgattgactaatgatgtctgccatgggtgtggaatagacaaatgaagacaaaaattcaaatacctcactgagcagcagagtcttaatccatcaggaaagcctatgaaaaaagaaaaacagtcttcatttacacattttttctctgtaacaaaatatgttttatgttgaagagcggtacgtaatttctactggggttgatcagatgaaaagagagagaaatctgaagctggtggtagccgtcttgcaccaagagaagagaagctatctgaaaatgaagaccaagctattcttttaggcaaggaaagctaccctatagctttggttacatgagcccatttttccctgtttacttatgccaatatgaactgggtttatgttatttgctacccaaagcaccctaatagatttattaaaagagccaagatcacttaatttcttttggctttgagtggtcttacctgtcagtggaaaataataaacttatctgtatttgtttaataggattgcagtagaaaccagccgagacaaaagatgccggagttcttggaaaaatgtatgtgaaatttcaaaaattaaattctagggggatgtgtgtgtgtgtgtatggtttgtgtgtattataatgaagaggacaaggtgatgtgtatttcagataatgaggtagataatccactacattctgtttttgattctggaaacactgatccataaaaacatgctattctctatgttattcctgccacatccaccaaaaccagcaaattctttcctttgtagaatctgcttttcaaatgaggtttcctatatgattgaacactttgattatatatgtatttttgattacctattttcttacagcatcctgaaactttatctgcacttagtaatttattcatgttgcctgcaatgcccccctatgtagcactttgagatgattctctgtggacctggccttcccattgattttgagtctcttatcgaggacctaggtagctttctgtgactccagaatattctaagagagctgctggaacagcagtgctggaagtctttgtctgcactcttcagggttacaaatgccaggtttttctcaccatccctgctgtggtccagcattcagctcctgtgaggtgtttgtcttccatggttcaggaatccttcaaagccactcacacaaccgagattgtgtcccatgggcagggaggagcatcctctgtttctgtcccaacactcaaggtcttttctggtttgagactcaaagatcaagtctacaggttccaaatacaaaaggacatctaatcactcaggaagccaacaaccatggtgattttttttctggttttcacttgaatcttatttttgagatacggatcctttgaaagatcttgaaagatcttccaagaagacaatccacatatctattaaagtcaatcccttcttctgtcatccaaatagaagatggtataccccttcccaggtgcatggaaattccagtatctccaaggactccaggaggaatttcagttctcatagttactgctggctcttttggcctatatcattttcttttgcatcatgcttttgttagtagtttcatttttccacaccaaattgccttgcttaacatcagcctgattcttttgggtagtggtagctgcccagaacatgactgcctcacagctgtgcatggtagacttccctggaagttcagaataatccaagtgtgacgtttggcatttctgcccttaaagttttcccggccatctcttctctctccctccccccaaatccaccttcttttatttttaaaattttgttcacatagtagcctcgctaatcacattctgtgctcaaagtgctttgccttcatccttcatatgcttctcaggtggtgcttctaaatcaaaaagggttctctagaattctctccccaaggggcattgtatatcagctttatcaactcttggaataaattatttcattttcaccattattcttagcatgaatttgcaaaaatttaatgtataacaaatgagaaagcatcagggaaatgtcctgacccatattatgtctggcaaatgttagctactattactggcattatcattatacagagtagatgttttgtatacattgaatcattgaataagcaaatgactgaatgaatgaatgaactgaccatggtcctgggggtaacctaaagtctaggagtgttttaggtagatcaccatagcctctctcatttctccttagttgctctggcttttctcactgaggttgcaaagagacataggggacacatgtttcattagtatcattttgaagatgagaatcaaggcctagaaatactacttttacaaaggcacgtagctggtaagattctaggcaagctgagaaatgcacacaatgtgggctttggcgtaaacttgcctgggttcaaatgccaagtgtaccacttaatcacttccggcctgcagcaaattctcagactccccttagcctcaacaaccttgctggcaaagtgatggttataacagtacttacctcttagaggtgctggacaattaaacaagagtgtccatgtgcagtacatggcatgccctctgcccagataccaagcacaccaagatggggccagctcctagtcaaggacttttttcccacattttcccttcacttcccttcacctgttactacaaagagtggatccatcctgtatcatcacagggaatgttccccctctctttagggactagcccagatgttctatacatcttgggtctgtctgacattgccatcacttacaattatcctgcaaatccagctttcaagctctggcagtgttatgggatatccccccaaaattcatacgttgaaatcctagccctcaggacctcagaatgtgactgtattgggagacagggtctttaaagaggtaaactgaaatgaggttactaggatggaccctaatccattatgactgctgtctttacaggaagagaagatttggacatgacacatacagggggaagcccacagggagaagatggctgtctgcaattcagaagagcagcctcagaagaaaccaacctgccaacatctttatctgcgacttgcagcctccaaaactgtgagaaaattaatttgttgtttaagcatccagaatgtgagactttgttacagcagccctagcaaattaatacaagcagcaaacaaccagatgtcccgcttgaaaacctcatccaagaaatagaaaaataaatgttgtgggaatgatgtttgatggcggggttttattctgcagttgcctacaggaatgacaacagaaaactgtaagacggtgtatttcaaaatgagctctgcagaaaaccagtatgaaaggctctgaaaaaatagaaataataaattttcaagaacaccgagtttgggaaaatttatatactctaatgccctcctacccaccttttaaaaactgtaatgcttatttagagatttgagaagtcccagagaaaagccagcattctgttattacaaagggagatgagcagtctttagcctccacagtctttagcctgcagctgaactggggttcaatgaagcccacgttctgacatctttacttggcagtccctctgtgtctgacattggttcctcccagtgggttattggtcttgctgacttcaagaatgaagctgcggacccttgcagtgagtgttacagttcttaaagatggtgtgtccggagttcattccttcagatgttcagatgtatctggagtttcttccatctggtgggtctgtggtctcgctgacttcaggagtgaagctgcagacgttcgcagtgagtgttacagctcttaaacatggcagtctggagttgtttgttcctcccggtgggtttgtggtctcactgacttcaggaatgaagctgcataccctcgcggtgagtgttatagctcataaagctagtgcgaacccaaagagtgagcagcagcaagatttattgtgaagaccaaaagaacaaagcttccacagcgtggaaggggaccccagtgcgttgcctctgctggcttgggtgcccagtgtttattcccttacttggccccacccacctcctgctgattggtccattttacagagtgctgattggtccgttttacagagtgctgattggtgtgtttttacagattgctgattggtgtgtttataatcctttagctagacacagcactgattggtgcatttacaatcctttagctagacaccaaagttcttcaagtccccacccacccagaagatcagctggctttacctctcacctccagtatgcaaagagccagcagggaagagattgagtttagatgagaaaagaagcaggttgtgcttgggcagccagcagggccctataaatctgcatgaaaatgctgctcagaacagagagggcacatttcaataattagcacatactttaacaccagctcatgtctgtcacagacaggaaattgtaacttctgtgtactgggccgttgttcaaagctgttgtcagggttaacgatgtacctgcttgattattggtagctggaaattgaggttgtgctcacatgtccataggtcttgcattcctcagagctcagagactgccgtgctcacatgagaaagggcacagcatgttagtagaggggagcaaagagggaggctgggagaggaggctgaggccagatgctgcaaagacatggataaatctcaggaggctggacttgctctggcagggagtggggagatgatgaaggacactgaggtgtgagggtggcctttggttttaatcaaaatgaagcccatgctggcatctaactaagataatagcaccaagggaaggaatgggaagccggggagctagaaagcaggtatagtaggagaaagttctgacccaaaggctttgggcagatttgaggaatgtgaagaaatttggggatgaacaggttctttgtggtttgatgggacagacaggaggatgcattgcctgtcacttgatcagggagtcaaaggggagcagggcttggaccaagagaggttctgtattaaatgtcaagtgtttataaatcagggtgagagtccctcttgctgaatctgcctcttttatcttggctgttccacaacatagattccattgtgcaaatgatcatatggacattgtgtgatattctaagccaaaaagtgactctggcagttccagcccatgagtatcttttggcagagttctagtgtgagaaggagttcctgtgcagcactgtctgtctgactcagctctgcaggaacggctggaaccacagagctcatgagggtacactgttcacaggcagggctcacacacgctctgcccccagctcccacgcctgagcaggtcacaccaactttgaggcactaccctgagcctaacatgttttaaaatgtgaatcatgcttcaagtgactcttttgagattggcagggatggaaagagtccaagttttaaacttagtttaagttttaattgtagagatgacaactgacacagatatgtcagaaaaacatgttggaatgtctcgactggcagtggtaattctgtgagctcagttcacattgctctggcctctgacttgtaacatttaggaacctgtgaaacatacaaatctatgcacatgaaaaatccaggcactaagaactcagccttgattagccattaagtgtgctctccgtagaaggggaaaataacattgtaaggaatatgtttaatctttgtaaccaaatccatggtttttaacatggaatatggaaattggtgccactaattatagtcatttttatcagttcattgaagttggctcagcaggctctgtttctcccactcttctctggcaccacatttaattgtcctgtgtagtgtaaggtctgtagaatgaaacagcactccttttcaaatagtgtctaatgtgagcctcagtgatccagaccagactctgcaatgcccagcagcctgggtgagaagtttgaagagtttgtgagaacaacgatgtcttgaatgggccatgaggaacactgcaactctgcttttagatggatttccacttttcttttctgcaagcgttttggagaggtagcatgatgcacttctctgaacaaaatattttcataagttatgttaatggagaaatttcttttggggcttaagtttctacttacctttgtaacatatttttttcaaaaaacaacaagaaaaaaacctcattatcttcctctcccacaatcatagcagtagaaaggagataaggcaagtcccacgtggaccggtggctgggtgtgctgccaggatagataaggcgccccttttacaaacagtctttaacatgcagtcacacccgcaatctcggtgctgggtaataagaataattgtgttcattacacagttgaatacaggaacctatttctgaaatgattattcttgtctagaattacacagaattccaccgagtggcatattcaagagaatttttattaggggaattccaaggagctgcttagtggcagaaagaatttatatttaatttgatttctcagaaccagggtattgtggagaaaggcatcagataaccacggagtgctggttaagggagggaagcctcactaagcagggttcacgcgttcaagccccgcagccaacaagcaatcgttgagactgtcattcgggagtgggcaccaagatgcctcgggatcccagtgaattcatacttcctgcctcttatatccttgcatttggttacagaggtggcacatgctttattactgagcctggttgaaaatcacctctggtcagaccttcacagctcacctacgtgggcccaggacttgtgtgtagagaggaatgaagggttttgtaaaagcttttaccagtgtggagaattctccttttctcattttgctcttgcataaacaaagatctttaaaacagtttatatcagtagaaagttctatgagactactgtgagcacctttgcagaaaaacaacttagcagtaaattctgatgcttgtctgtagtgtgttaatggtggtccctgaaacgacatgtccacgtcctagtctgtgggtgtgatcttatttggaaaaaaaagtctttgcagatgtaactgagttaagggtctcaggagaagcagataatcttggattaatttatgggccctaaatccagtgataagagactcacagagaagagacacagagagaagaggtgagggccattgaaggtggaggcagagactagaaagaggctgccccaagccaaggagcacctggagccaccagaatctgaaagaagaaggaagagttattttccagagccttgggagggagcatggccctgccaacatcttaatttcagcttctggtgtccagagctgtgacagaatgcatttctgttattgaagccaccaagtgtgtaagaatctgttactgcagcctcaggacactatcgcatgttctcatctttaggcgtggggtaagcttctcttcttcattctcctgggctttagtgcaccacagtgtaaacaccacatcttacacttcctcattatccaacaacagtctccaaggctgggatggttgagtctgcaaatcacgtttgagagtcagaggatgtcagagctggaaggggtctcagtctcctcttaaagagaagatgttgggcaagatactcccttggatctgaattctagacctgtcctttcactcatgggctaagtgcttttgcaagaaggtggtagatgtttttttccaggttgtgctagcttggtctagaaagctcccaggatctggttctagttgtgtccctctgtaacctcaccttccacccccacctcccggatctccagccacaggaacttttctgaacatgttctgatcctgctgttcatatgcttttctccacaccaggctgagagagggacaaagcatcctttaaacccagatccctgtccacaggcctttccctgatcctccaggtggggtcgctcttcccccgctccctctgtgcattgtatgcagtgtgtggattctaccacactctagggctactcacaaggcccagcagacctgcagggtctgtccccaaccttcctcctagagtgacctctcatcacttcaactgcagcccctcagatgcaccaggacccctcctgccatggggcctttgcagatgctgtgctttccctaaagtcctctactcctctttacaatggccttggattatagttaaaatgttccacatctttgttgggattaattgttcaatgtctgtgtcttcactgggcagcaagctccatgggggcatagattatgatggattttctcctagtatagagccccagcatgtagcagatctaacaaacaaagacttggtgactatatgttaaatctatgtagatgatcctccatgactttatgagctcctcaagggtagggtcttcttaattttatatctctagcatttactacagagcctaagctcaggtactattttggttagcattcattggctaggtgaacaaaattctccttttctagagtttagttttctcaactagaaaacttgggaggtagacaagttcagtattccttacactcttttttaaaatggtcatagcttcttcgatggggcaaaggtcccctttttttctaagctaacttgtcccacttaccagtaaaaaagtaacaagccaaataacaacaaagaattggatagaaatataataatttaaaatattcactcatgcttttttttggctggcaaccctcttgttctttttgccttcttttttttcttccattctctctattaattgtcagattcaaactagaccagagttttccatcaccttaaagaaaaaattgttgctgcagaaaggcaaagagaaaaaaaagtcagttctcacctctcaacttcaaaccagactattgaaaccaatggcttggtgtcaccaggggcccttctggaagcagacacacagagctgaaattgagagtttaatgagttaaggagctatttacagagatttgggccacgttcagggtaacacatagccactggcatcgggacgcctttatcaccttaagctagaggagtgaaagggaagagaaagtgtgttaggttgtccttgcattgctataaagaaatacctgaggatgggtaatttgtaagaaaagaggtttcatgggctcatggttctgcaggctgtacaagaagtagagtggtatctacttctggggaggccccagggagcttttactcatggtggaaggtgaagcaggagcaagagagagagggagcaggtgccacatacttttaaacagccagatcttctgagaagtcactcactatcaccaggacagttccaaggggatggcactaagccatttataaaaaaaaaaaaaatcacccccatgatctaatcacctcccagcaggcccccctgtgacattgggaatcacatttcaacatggggttcagatggagacacagttccaaaccataccagaaagcctagcagaaaggactgcttggcaggagctgtgacattcagccggggacccagcagggatggagctggaggaagacatgcccctctttgtgcttgtcttcctttagactctgctagggccacccttgcctaaactcatccaggaaccaggaggcaagggagccatggataaagcccttgcagcggagccacccagagcagagtgaggggcaaagcgaaggcctccagaatggaccaacactggcttcagagaaggaagcttagaaggacctcagcaatgcatttatgccacagcaataaatgtgggaaaaacataataagaagttctcagagccagttttccctccctctcccatcttcatccctcaaaacagataaagacccttgaaactggggcaaaggacaggcattcggggtggaaggtagtgggtggcagggttgaagaagcccactgagggctctgtcatactgaagtaaaagtgagactccactctagaggtgaggctcagacactggaccaaattaaggactggctaaaatagggcctgggcggaagcagctttccataagacatacccaccagtgtgccacatcagcttaccattaccgtggcaacacctggcagttaccgcccctttctatggcaatgacccaataacctcaaagttaccacactttttctaaaagttcctgcataaactaccccttaatctacatgtgattaaaagtgggtgtaaacatgcatgcagaactgcttagaggtgctgctactctcagtgcactgctcatggggtagccctgctctgcaagagcagtcgtggagctgccacattgctgcttcagtaaagccattttctgctgggcgcagccaagaaccctcaaaggctgagccccacttaagggctcacctgccctgcatcaatatcccctgggctgagttccttaacaataaagaactgaagccctagattaacgccagaagctgagtgcctggggagcctgaaccatacttccagtggagcctagggaaccaacaagtctcctgagggcctccagcaccagcagggtgtgtcagcatcggagctgtggtggagtctaatcaaggcaccagagccccccagcccatgtttcctgcaggcccatgcagggcaggagagatccctttaagttccatgtgtttcacctgtgtacaccccaagaaggtatagaggttgctgagaccagaggtcagggggaccatggaggtcactcagcagatgtcaacattcacagacaatgatgcttaaaagccagaccgcacacatgagcttcttgaagttcttctgcaacttccctgaggaggagaggggaaaactcatgcaaagactgaatttactcatttactaacatgaagtttcagctctggtagggaagggaggttgagagagaaactaagttcagctatagaaacatcaagctgtgtttctttcatgcacacctgagttgtggccctgttcaatagacgtctcctcgattggatcaggtgagcctttgtgtggcccagcaaggcttcagaactcacttgtaaaagtatagaaaggacaggtatcacaagagaggggacacttgcctggcctccccatcctttcctctgtcatttagcttttgtttggaatatagggtaagtaaaaagattaaaagccccacatgaccttggaacttcatcacttagatggtagagagactcataatacacaacatgcctttgaaaccattttaccctctggcctgtgtcaccgggaaaaatctctctcattgttctgctggcccctggccataggcccacaccttggaatcctagtttccagtccactgaagctggttgataataaaaaatgaatccattaagtttgtacctgaattttttcctgcaagcatctaaggaactgataccatcttcttaccaaaaaatatctcacttctactgcatttcatcagagttacaagggattacagctaagtctgtaagggaataataaaatgcaagaaacggaagatcatttagggctgagagatgagttaattcagataagaaaatgaagacccaaggagaaaaaaattatttcccaaagaccaccttctaagttaaagacttaaatcaggcctcttgattgaaagaccaaagtcttttctttctgccattttgactccccacaccaccacagtctccatctacatcaggaagttatggctggcaccttccacagatggacctgagtactctgtctaccccaggccccatactcagcactgggggattacatgaggaggaagacagacctggtcgctgcctttgaagtgtatatacctgcctgcattgaactggatcaagagtcctgatttaggttatttggagtggctggtgcattccaaaagcatctttcttagcaagctgagaccaatcaaagggttgatgcccaaatctcatctgtgcaagcatgagaagacaccatcagctttggactttccatgtcctggttaaaaccagtagacaatttgtgcctccctaaatgaagaacttagtgagtggttggaaagatggctgaagccatcattggtgtaagcattgtcaagggcatgcctgtatggttgcttgcactcaggctgatgtttagtgtaacattttaaagatctgctgggagggaggcttcggggctaaatgatactaagagtccacctcaggaaaaatgctttggtagccgatgaggactgtgttctgaaaactcaaccactgcactccccacgccctatgcacaggtttctatgggacccttgagtcctccacacctgccagtgcaggcagccagggctttccaaccccacaccccaggaaaagggttcctagataccagagcaaagaaaggcagtgtgggatttatagcttcaaaatagtctttggatataaagagtcttgatttgtagagacaattttttgatgcactaaagtctcaagaggcctggcatggtggctcacgattgttattccagcactttgggaggccaaggtgggaggatgacttgaggccagggattggagaccagcctggccaacctagtgagactccatctctacattttcttaaaaaaattagccaggtatggtagcatatgcctgtagtcccagctactcaagaagctgatgcgggatgattgcttgaacccaggagttcaaggctgcagtgagccctgattatacaattgcactccagcctgggcaacagaactttgtttcttaaaaaaaaaaaaaaaaaaaaaaaaaaaaggaaatcgttatcctttaagagtttctccttgccctttagatgagacactaacttctactgcatctataaatccccacatcccctctcctcagtttccaacctcatctcctgcactttccctcctgccagccctgcttggcaaggccttcagctcctcacacacaagcctctgccctgcatggggccttgtgcagtctcttccctcccttggaactcttccacctgcttcccctgtctgtatttgtcctctttgattcctgtttcagccttttaatgtcacttcctcagagagagctttgctgatcttccagtctagctcctggttgctagtgacttcccctctagttttcctgcatggcagttcatgaaactcttagcatgcttcagcgcgtgtcccttctgttaaatgcctgccttccataagctcgcgaagccgggcagaacttgacggtggctctctggtttcaaagatctccacccttgtcactacacaatgctcctgaagaaatgaatctgaaagaaacaaagaagcagaaagtatacatcaagcctatgtggaagagggccactgtaatgatgtctgaagctcctgtgggcctctccctacctggcaggagaagttcactgtgcctcagggacctcagggaggagacagggtgctgagcatggctttggtgtgaccctgggatgtcacccaaccttgttcctggcccatccacagcccctgcttgccatagagccaagtagcttccttatgcagtaggaactcttatccccatttatcagagaagcaagccaaggtgagcaatggacagacctggagctgccagcatgatcatgtgattgcaaaccctgagctccttccaataaccatgtgtcttataaataacagtgatggtgtgagctgtgcccagcaccactgaaaaacaaaatgccctagagacagtaatgtcaaatggagagacagacaggtagacagacagacaggtaatctcccctttgctaccactcaggatgttgcttcctctcagtctatttcccaaatcctcctttccccgcaccccataatcttgtcagggcttacctcctccctatgctctgcgctttcattaatttttttatcacctatccctcagctgtaatctaggactttgtagggacaattaattaaagtgaggaggttcttaaaaggaggtattgacctgcaagtcagccctttctgtctgcagaattaatcttcagattacgggtcaagaggagacatctttaaaaaagtgcccagccaatcgatttttcagatgtgttcaggaagtctcaacagctgtgtatgaacccgattgcatatcctgcttactgcctaagaaaagcataccccactgagtacacgtgagagtgcagcttgtttgaagaatctgttgctgtagaaggattaaagggaagacaaagataaaatgtgtattttaaaaagcatctattgatctatctatctagctatctattatatatatatttccggtcctcaatcctgggcagggtgtgtgctgtcagagatgggcaaggatgggtgccagccattggagagctgttccagggagggagccggaccttagccagcccaggcagcaccagagaaagactcatccaacactgaaatagacggccccagtgtgcgcgttacaatagcaggtgagtaaaactgtctattgtacacatgcggatataggagctttgcaattatctagcctaatgtgcagataaggaaatcggggccctggtaggtacatgactttctcagtcttgctgtgtatggtccattccccaaactgaaattcaggacctctgacacccaggctgggctctaagacatgctgccatttctcaggggagcaattgagagaagcagccaggcattttcctgtctgaccccaacaccagggttctaatctcccttaagctcacacagcacctccccaaccacttttgtggagagaacaaaaagaaagatgtcgatttacccggagagcatctgtcactaatagtaacatgcggccttcactgagggttaactgtatgcaggtgtcgttcttatcttcttacaagtattagtccatttacaaataaagtgtgggaggcttagaaaggtcaagtggcttgtctaagctcacagagcaagtcaaagctggaaccagaattctgggattagtcctgtgttgcaacaattctttattgcctcaacggacaaggtgcacatcaatttgaattacttcagctaagctgagtgacttgattcctgttccttacattgatgaggatgccaggcctgtgcctaacccttatcaggagctggagagcacaaatgaagggacaaagagaagtacacggtagccgagtatagtgaacaaaatctcccgcttaggtcaaacaggggcacggttgtgttctgcctcatctcaagaaaagttaggacctaagctccatgatcatcggttttctcatctctaaaaccggcataataacattcaccttttagggttcccagggatcttggattagtctgcacacatttccaggaacattccaggcacctggggagcagtacagctccttcaggaggtcctcgatcatcatgaacagatgttagtaatcatgactgacacagatgctgcctacgggatgatgacggtggtgatggtgatgataaagttgtggttacgctgctgctgtgatgatgggataacagtgaggacacaagaaagaacacggctctgccatgtcaggaccatttaggtcagtggttccgaaccaggagtgatttcacccacaggggatgtttggcaatgcctggaaacacttttagttgttcacactgttgggggaggtgctattggaatccagtcgtgggggccagggaccttcttaagcaccctataatgcataggaaagcccccacaagaaagaatggtccagccaaaatgtctgtggggcccaggttaaaaaaccctggtctaggaggacagaaaacctgaacactggaagtgagagattgaagcttccaggagccttgttgactacttaacaaacccctttcagctgctgctttaaaccatacaggaatctgcaccttaaaggaagagggcagagttgttgacagtcaggaagactatggtgaagccgttccatgggacctcctccctctatttgccgggcagcctggtgcagctgcgtccccggcccctccaagtccacgtggaaactgtcccctggttgtctagatgtgcaaaagggtgtctgcaggagcagtcttgctctcccaagcctctgacactgtgacaggtggacagaagcaggagcgggaggaggaggggagaggaggaggagagccacccataaatgaaagaacaatggagcatcgatcagcactttttcacagcaggggagctgctttgctgagccccagcactgtcagacagaccagacccttgattaaacctgtgcaactgctggcatggatggccgtgcttagctcccatcagcaactctgccagaaagaagaggcgccacagaagttatgaaggggcccagggctggcagctgggtatctggagggctggtaccctcttccctccaccagagctggctccaaatttcagactcaaagcagaaagtttattctgtatttttccaggagatggggctggttggaggtgagagcacagggaaggctagattccctgggaatcccctgttgttttcctctctgggaggccttggtgtgcaggttccagacactgccctagttctcatcatagggcagggacacggggagtcctcaccaaattccaaatgcctccacagagagggaggctccgtgtggtgatgaaacctgctctgttcatttcgtcatttggaattctcttggatggcctgtgagttttctgttatagaatcaaaaaccacattttcttaaaagatgacagactgtggtctgttctgcctgagacccccatgtgatgccagagaagccacaactcgcaggccctgcatcacctgctgctgtgtgcagatgaggaagtctgtcttcctggagggggttcttatgagcacaaacagtgacgaacgacgttaaatgcatgatgaaaaactaagccaccacagaaagccagctgctcaccccatagaggcacagaaagctggctgctcaccccacagaggcacagaaagctggctgctcaccccacagagggagagcactttgtggatgatacctgatttttttctttcttttctttcttttcttttctttctttccttttctttcttttctttttttctttctttctctttctttcttccttccttccttccctcccttccctcccttcctcccttccttccttcctttcttcctttctttttttgacaaaatttcactctgttactcaggccagagtgcagtgatgggatcacaactcactgtaacctcgacctcctaggttcaagcagttctcctatctcagccttctgagtagctgggactacaggtgcacaacaccacacccagtttatttttttgatttttggtagagggtgttgctgtgctgtccaggctggtcttgatctcctggcctcaagtgattatcccaccatggcctcccaaagtgttgggattacaagtgtgaccgccatgcctggccaagacctgcttcttaatcattgttggattcacagagcttcacactgtgccatccatggtaccatagagagaaaggaaagcacttgtaaatgtgtatgttactgcccccgctacctcccagggaggtgaatccctcatcaggggcctctgctgagtggatgatgggtatggagatgggagggaggggaatccctcatcagggcctctgctgagggggtgatgggtatggagatgtgggggaggggaatccctcatcagggcctctgctgagggggtgatgggtatggagatgcaggagaagaggagttggtacagagctgaattgtccaacatacaacagagaaataaatgaaaagtaaggcagtggctaacatggggtttgggtggggccaaggaaaattgagtagctggcaggcgggtagcaggaaaggggaacgacgggggctgcgatgttacagggtaggttctgaagttgtctgacaggtggtgagtgatagagacctttttcttgatctcccagtgaaaactttagtaatcacacgactgccacttttgtaaaaggggcttgcatttgggggctgcaaggttggcgcaaggttagatccggggttgcccgtgggagacctgccacagccaggctgcatgggaacagagcactcgcttcttctcatggctgtgctggtgcatggcagcccctgactcaggtccacagtctgacactgccaggttcaaggttggactttacccctggcccagatctcccacaggctacttattcctatctccttccaaattcagcaactcattacaccaccttgaagaagatggggcagagcggaggggaggctagagggacaatcccaaaaagagccctaaatctacatcagattttccttttaactaaaatctatttggtattcagcagaaattttgagtctagtgtttgacataatttaatagtgtgcattaatgactataattttcccctgtagtcgagatactaagaaaatgagacgtgcttcatctacaccacacacaacagtaaccaggacagacttggaaatgacagtaaagaacaaagtccgtgagggccaacagcttgtggggaacttcagagacacgcagcactccacatagaaagcacattccactccagttgtaagaaggtttgagcctccctggtatttgttacgttcttttacgctgactacatttctgtgtggtgagtaaaaccattctcattgtgcaggtgccaaagctgaggccagagggattaggagatggtatatgtccaaggataacattaagatgttttaagttcagtttattttattttattttattctttatagacagagtcttgctctgttgcccaggctggagtgtagtggcacaatcacagctcactgcaacctggaactcctgaactcaggcaaaccttcctcctcagcctcctgagtagctaaggctacaggcatgcaccaacacacctggctattttgttattattattattattattattatcattattattattattattattattcgtagagacagggtcttgctatgttgaccaggctgatcttgaacacctgacctcaagcaattcttcctcctcggccgccctaagtgctgggattgcaggcctgagccaccatgccagtccataaagttttattttaagtccttagatgtgggatttcctttttagagcagcaagtactacctgaactaaaacaggtggtcttgcaacttgcaatggattatggaaatagatggcatctatattggtgaggttctcaccaaaactcaaacagaataaatgtcatttgaagaacaaatctcaactttaactttctttcatccatgggtaagtgctacatttttgaaaaaaatatgaatttaaataaaagtaatttattgtggtgagaatatatattacctgtcacgaaacatgtccttctgtatgttaacttacccaggcaaatgaaaactttagtaaaaacatttatgtctatatctgtcttctaaactacacctgtgtgtgtgtgcatgtgtgtgtgtgtgtgtgtgtgtttttgaggggttcctactttctgatgtacaggactctgaggcctgaatagttcattgccataaactgagttacttcttttggaaaaacataaattttgttattttagtcttctttaactttcatgtgtttgacttgccttaattatatattggtagaattaaatgtttcatgatcagaatttggacttttgcacatgagtccacaagtgttggaagctttctcaggtgcagcaatgccaatctccaaaaggtccaactcggtaagccagtgtttgtgccactatttatgtgtttgttattttacgcttcaaaaaataaattagaacagaacagaaaaatgatactagtaacaaagatgtttgtcccatcactgtaatataattaagaccgagatggaatggatcaatgagctgcatgcgtaagtctccatctcaaatagactttcaaatggttgcattataaaggaaaaaaaactagattcaatgaaatgtgttcaatattatgcataaaaggcacaatgtattcagatattttatactagttttcggcttctggcaacagagcacatccacccagctaccaccacagctaaaactataatactatttgttttatgatgtcttttatacatgctttcaagaacacattatatacaaaataggtgtttctaatgtgcttcacttttcctgtggcctcccagaggctaaaagccacatttgtagcacagttttcatgaccgtagaggccctgaaggcctgaatgtcatctcttccccactgttcactccttttactggtgttataccccaactctatggaacactattaaacattttctttggctccaatgttttaaaactcaattgtctttgttcagtatgaatttgtgatctgtgtcaaatcctcgtgttgtgtagtgaggtggggaacaggtgaaggcataggggttgagtaaaatgctgagcatgcaacaggtgctgggcaagtgaccgtgaatgctgggaggacccttctgcctattcttccataatggcagaagtggacaagcagacattagtgtacagtgagaccacatctatagcataggtgtgcacaaggtgactgaagacctgggagaaggatgtgtaaaccagcaactagcgaagggctcttcaatagcaaaactcaaagcatcccttcggcatagaatatcaactatctaaggagtaaaaattttaagttgacttttgggtctggttcagctgacagagtgagcatgtatttatttcctgtagtggattgaatgtttgtgccattccaaaattcatatgtttaaattctaaaccccaatatgatggcattagaagatggggcctttggaatttaatgagctcatgaaggcttgaggtggatattccattctccctttgattttcctaaatattgcccacatcttttaatatctgtctccttatccaaatttgcccaattacatagttaagggaaccatctgagacagataaactctgacagagagtgcagaatttcaaatctagaaattcgtactcttctaaactactaagagaataagaaataagatgcatgtatattatctatggttataaaagtaactgaaagcataactaaaaataaagttatactgttaagagaatgtgtgaggaagagatgagagggtctagagaagtgcaaagagctaagctatttgtcttccacattaaagttaggggaaaaaaaaacttttatctgagaaatgtgagccctttcaaattatcaggcctggagagacataaaaatgagacagcaatcatatcctactcctgcttttgagctatgtatttacctattgaaatggcttgctattgtcacatgcagctatgaattaacctaataatgcctcaccagacactatattccacaccccacagtacaacaatgtatagctgatcagtgatcagttttgtttctgtaaaccaatgagaattcctgacaggattttgcacactccctttccccctttcttttcttttcctttaaaaacatgcctgtaacaaaggccgaacaaagctcatatccaaggttacttgggtctgagcctcctgggcagcttgtccttattttagcatgcgagctgaagactcacaaggctcacaactttggaaaggacacctttatttctcataaagggctgcaccctgcaggctggccattccacaggctgagaagcatagcctccagcagaagcccaaagcttgagggaggtgtgaagggaacaggaatttatgctgaacaggttggctaaatatacatatttaataagctatagaagatgtcatgaatatctgtgaaaggagaaacaggcacatgtgcaattgagcttcatgcctcttcgtgggtcacatattcaaaaaatggtgatcttggcatgatctaaggagtctttggccctctgatgtcaaaaagtgacaaagaggggaacacaaaaactctcactgagcatcctccacaagttggccaaaactagtccagagttggtggtcagtttttaggaaggaaagcattgtgaaactgctgagctgctgtgccaaacgtgcagagaggaaaggagagtccagttgtggcctcagatgactggctaaaggtgatagaaaaatgagttgtccgtttcttgctttctagagctggtttctgcctactccttaggaaagaattctggttaaaggttaatgagaaagggacttactgaggcgtgtctgacctcccatcccatcacagccaggaaaactcagtttttaaggtttatctgggatcctcctggctgtttagtccactgggggacttaggattttatttttatttctcagtctcaagtaaactgtttaaatctcactttgtgtttcattctcttctttttaagtggacaaaagagaaaaaaatagaagaattcctagaatttacatttattcagtaagcagcagtgtcaatgcttaaacaattatacagtaatactaaaaagttcctttctgcaaagctgtggttgagtgggtaatgaattcctaaatgctggaaatgacaagatgtgtaaaactaccctctgttttttaaatatttggctagtccttttctcccacaagcttcctttgtcccatgattaattattctaaaatggttgggccatttctccagaatatagaatatgttagctgtcattaccacacacttgggaaatggtagcattcgagtctcttgcctgagcatggctgtgagaggtattcagaggatgctgtggggagataatgttttggtttcacgatcaggaactaaaatccagaaggatctcacacttcagtgcattccaaggcacccctgttgactattgtatagaggatcccaaaagataacagccacctggagaaggaaagcagctcataacagactgagctgtgtgtctttaaaaaaaaaaaaaaaaaaactcacttgtaactgctactaatgagagtgtgtattcagggcaacttgaatctatgctcccaggtggccatcttcaagctcaaataaactctatacttaatcataatttctgaatctcgttgtttaaggttggtacaccacaatggcctagcatcctcctgttccatgagcaacagacaccattcaaagggctcttcctccaatatctagactctctttgtaccagcaatgttaactgtggagcaattatttggtaattaaacaaccacagcagtgttattagctccacactctgaatgacatctttaagcctctctaatgtgttaagcatgtctaatgtgtttttccacttttggataacttaagagaccagaatatgccatctcaaaatatacccctttggcataagcattattttgagccaattatttttgagaaacagcagacaccagagaaacagagtagaagttactcttttgcaaggaagacttacttctatgatgaaaattttctttcataagggtgccttcctttcagcactaggatgagaaggatggcttaatcacaagagactctcatccatagagaaagctctgacttaaatctgcataacaaacttcaccctttgtctgccatgcttttcctggtcacctttccagaactggcctcccccacagcctcctttctttatttcagatgaagatggtagtaaagcctgaattctaagccttttttttttctatttttttttttttttttttttcagattttcccgcttttcctgagtatctcctatgtatacaaaaggaatacatgttgataaacttctggtttgttttgttctagtaatgtgtctttttttttaacaagggatcctagctaagaccttagaagaataaacaaaaaattactttttcaacccctgcaataatcaactttattgggataaagattcatatttattgcaatatgtcttatctttatggaaattcaaaaagaattcaatcacagaatcaaaattccagaactgtacccaaatattagtgaaaatttagtatacaataaaagcaacatctcaaattagtggagaaaaaatagaattattaaaaagtagtgttggaaaaaccatataaccatatagaacaaggtaaaattgaatccattcattacaccctataccaaaaagttctaaatatatcagatatttaactgtaaaaaaatgcaacaaaacaatttttttaaacttgataaatttttctatcatctgggagtgaagaaatgttttcctaacataaaattttgaaacataagaaaatgtttaataaatttacataaaatgtttaaaatcttagtataataatgtcagaggcatttgaaccagagtgactccatcttgagtaagctctggataaaataaggctgagacctactgggctgaattcccattcttagtcacaggatgagctaggagattggcacaagatacaggtcataaagaccttgctgataaaataggctgtagtaaagaagccagccaaattctaccaaaaccaagatggcaatgaaagtgagccctggtcgtcctcactgtttgttatacactaaccataatgcattagcatgctaaaggacactcccaccaacaccatgacagtttacagatgccatggcaacgttaggaaattaccctagatggtctaaaaaggggaggaaccctcagttccaggaattgcccacccttttcctgaaaaactcgtgcataactctccccttgtttagcatataatctagaaataactataagtatccttagtccagcagcccaagctgctgctctgcctatggagtagccattctttattcctttacttccttaataaacttgctttcactttactctgtggactcccctcaaattctttcctgctgagatccaagaaccctttcttggggtctggattgggacccctttctgggaacaatagaaaaaataatctaagtaaatggttaaatggcaaaacagaataaattatttgcaaagtatatttaaggcaagggttaatacacctaatacacaaagaacttttttaaatgttggtgcagggaaccaattactttataataggctaagattatgaacacacatttcacagaaacataagcacaaatatctcttaaaatattttgaaaggttaaacctaacttataacttaaaatgcagattaaaggtgtactgagttgtgtgtaaccagacacaaaaaatctaaaagcttgatgacatatttggttggtgattctatgagaaataggccctctgataaattggcagtgttaagtgcaacatgatacagtgaaggaaaattcagaaatatccatcaaaaccatgtatgcatttatcctttcagccagccatcccacttctaaagatctagcccaaggatgaaccgagaaagaaaagaaaagaaaagaaaaaaaaaaacatgaaaagaggctattcactgcagcactattagaaatagcaaaatctcaaatgcctaccagtagaaagttggttaaatagagtagagtgcacaacacaactgagtaccatgcagctgtgaagaaaaaaaaataagagatatcttcatacactatatggagtaacctccaggctatagtaaaaagattcttcaaaaggaaaataatgtgctagtacactatcatttactaaaacataaaattacaaaaattcaaaaggggtgaagaatatatatatatatatatatatatatatatatatacacacacacacacacacacaaacacacatacacacagatacatatgaaggtgtgtgtatatatatacacacatgtatataatgtatgtacgatttccttatattaaaaaaaggaaagataaaaatggttactgtatctgccaactgtaactgcaataatggcatgtgactttattagtctcttttcatgctgctgataaagacatacccaagactgggcaatttatgtaggaaaaagggcttaatggacttacagttccacatggctggggaggcctcacgttcatggtggaaggcaaggagaagcaagtcacatcttacatagctgtcagcagacaaagagagagcttgtgcagggacactcctccttataaaaccatcagaactcatgagacttattcactatcatgagaacagcacaagaaaaacttgcccccatgattcaatgacctcccattgggtccctcccacaacacatgggaattcaaaatgagatttgggtggtgacacagccaaaccatatcatttcacccctggcccctcccaaatcgcatgtcctcacatttcaaaacccaacatgccttcccaatagtccccaaaagttttaactcatgtcaacattaacttaaaagtctacagtccaaagtgtcatgcaagacaaggcaagtcccttccaactatgagcctttaaaatcaaacacaagttaattacttccaagatacgataggggtacaggcattatgtaaatacagccattctaattgggagaaattgggtgaaacaaaggagctacaggccccatgcaagtcagaaatccagcagggcagtcaaatcttaaagctccaaaattatctcctttggctccatgtctcatgtccaggtcacactgatgcaagaggtgggcttccatggtcttgggcagctctgcccctgtggctttgcagggcatagttcctctcctggctgctttcatgtgctggagttgagtgtctgtggtttttccaggtgcacaatgcaggctgtcagtggatctaccattatgggctctggtggccctcttctcacagctctactaggtggttcccaagtaggaactctttgtgggggctctgaccccacatttcccttctgcacttccctatcagaggttctccatgagggcctttcccctgcagcaaagttctggctggacatccaggcatttccatacaatctctgaaatctaggtggagtttcccaaacctcaattcttgacttctgtgcacccacaggctcaacaccacatggatgctgccaaggctgggggcttctactctctgaagcaacagtctgagctgtaccttggcctcttttagtcatggctggagcagctgggatgcagggcaccaagtccctatactgtacacagcatgaggaccctgagcttggcccatgaaaccattttttcttcctaaacctccctgcctgtgatgggaggggctgccacaacggtctctgacatgcactggaaacattttcctcattgtctttgggattaacattaagctgccccttacttatgcaaatatctgcagccagcttgaatttctcctcagaaaataagattttcttttctattgcattgtcaggctgttaattttccaaacttttatgtcctgtttccctttcaaaactgaatgcttttaacagcacccaagtcacatcttgaatgctttgctgcttagaaatttcttcccacagatactctaaataatctctcttaactttccacaaatctctagggcagaggcaaaatgctgccagtctctttgctaaaacataacaagagtcacctgtgctccagttcccgacaaattcctcatctccatctgagaccacctcagcctgataatgattgtccatataattatcagcattttggtcaaagccattcaacaagtctctagggggttccaaacttttccacatttttctgtcttctcctgagccctccaaactgttccaacctctgcctgttacacagttccaatgtcactttaacaatattgggtaacttttcaacaatgccccattttactggtaccaatttactgtattactccattttcatgctgctgataaagacattcctgagactggagcaatttatacaggaaaaatagtttaatgaacttacagttccatgtggctggggaggcctcacaatcatggcagaagggaaaaaagagcaagtcacgtcttacgtggatggcagcaggcaaaaagagagcttgtgcaggaacactcccctttttagaactatcagatttcatgagacttattcactatcacgagaacaacaccagaaagacctgcccccgtgattcaattacctcccattgggtgccttccacaacaagtgggaattcaagatgagatcttggtggagtacagccaaaccatgtcttgacaaactaccttaaattcagtggcttaaaagaatagccactgattcccatgttcccaggcctgtgggtcacaccaggttcgtcttctttctttgagatgtgagtctagggtcaggaggggcagctctgctttaggctgtggatcttcaaggcagctggtgtaactgctcatgtgtctcacttggcaacccagctgaaagactgggctaccagaaatgaaactgcctttacaaagatgatgacagtgaaagaagtctagcatggctgactccatcttgcttccagcctcagagactggttgtccttgcttatgcctgggcagaggtcaagctaacaacaggaggaatttagtttatagttaaactttgaaggaaggatgaaaatagtctttccctaaaactgatccctccttgtttaggggctgaaaccacctttgtaaaactaacaaaaggccacaagattataggagaaccctgaattctcctactatgtagttgtagtttctataattccttatcgcccaggagtcatgtggccagaggtcactagatttgtaacttccccagttgctcctacaatgctattatagaacctaagattggtatcttgacacattttttagacttttgcattctggcaacagactaaccccacctggacttgcgactcatcactcaaccggtcctatggcccctacccagaagcagacacagcacatgaggactgttttccacacccctatgatttcacccccaaccaggcagcagcacccattttctagcccctgcccaataaactatctttgaaaaaccctaacctctgagccttcagagagactgtgtaaagaaatataaataaatcaatggaacagaataaagaatccagaaatagatccacatatgaatgatccaatgatgttcagccaagatgctaaggttattcaatggagaaaagatagtctaatggggaaaagatagtcttaacaacaattggtgccatatccatatagaaaaaaggaatccttaatctttacctcacatcatataaaagataactcaatgcatcatagacattaatttaaaaactaaaactataaacttctggaagaaaatatagggaaaaaatatttggaacctcggagtcagaaagtttttttgatagaaaacaaaatgtatattttagaaatctgctttttgaaagacacgtgtgatattggtctttaacctggtttcctgacatgcaactccttttgaagattataatcttcaaaatgatgtattttgtttcatattgagttgagttgtggccagggaaccgtaggtagcttcaggatgggggcagttaccagaaagaccaaggcaagattccagggtcaggactttcaaccgcacccctcaaccgctgagaagagaagaggagctgagggttaagttcatcaccaatagccaatgatttaaattatcatgtctacgtaatgaggcttccataaaatcccaaaagaacaaggtttcgtggccaggcgtggtagaggccaggtgtgatggaggtcaggcatggtggctcatgcctgtaatccagcactttgggaggccgaggcaggcagatcacctgaggtcaggaattcaagaccagcctggccaacatggtgaaaccctgtccctactaaaaaatacaaaaattagccaggtgtgttggcacctgttggcgcctgtaatcccagctactcgggaggctgaggcaggagaatctcttgatcccaggatgtggaggttgcaatgagccgagatcgtaccactgcactcaagccttggtgacagagggagactccgtctcagaaaacaacaacaacaacaacaaagaacaaggtttggagagcttccagacagcagaacacatggaggttgctggaggacggtgcacccagggagaatgtggaagctccacacctcttccccactgcctcaccctatgcatctctttctctttattctttgtaatatcctttataataaactgatgaacataagtgtttccttgatttccgtgagccactctagcaaattaattgaacctaaaaaggggattctggaagccctgatttatatagctagtcattcagaagttctgaaggcccgaacttgtgactggtgactgaagggtgcagtggtccccctcacaggctcagtgactgagctcttaacccgtgagatctaaactgtctctaggtaaacagcgttgaatgggaggaggcccagctcgtgttcactgcaggcttgattgcttcctcattggtggggagaaattcccacacatttggtcacagaagtctttgttgattattgtgtgggatgacagcagaagagaaacagcttgagttcttccactttcaacaccattaagaaaatttaaaggaaaggtgcagtttgggagaaaatattctctaaacgttcatttgataaagaacttctgttaagaatatatgaagaaccctaaaactcaatttaaaaaaagacaaacttggaattttgtttgtttgtttgtttttttgagacagggtctcactctgtcacccagactggaatgcaaaggcgcgatctcagctcactgaaacctctgcctcccaagttcatgtgaatctcctgtctcagcctcccaagtatctgggactacaggcatgtgccactgtgcctggttaatttttgtgattttagtagagacagggtttcaccatgttgcctaggctggtctcaaactcctgtgctcaagcgatccgcccacctcagcttcccaaagtgctgggattacaggcatgaaccaccgtgcccagccaaactctgatttttttaatgggcaatggatttgaatagataatttactaagtaatgtaataaatggcaagtaagcacattaaaaaacctacaatcagatgatcttcaatgggtgaacacattattggcacatcatggcacatccataccatgaaattctcctcacaataacaagaaatgaattattgacaaatgcagtaacttggatgaatctccaggtaattctgctaagtgagaaaagccaatccctaaaggtcatagactatataattccttttgttccacattcatgaaatgacaaaattatagaaatgaagaatggattggtggtttccaggggtcagggactggtgggcaggagtcagggaagcatggctatgaaaggccagcaggagggagccttatggtgatgaacgtgttcaggatcttggctgtactaatgtcagcttcctggctgtgtatcatactacggctttgtaatatggtaccataggtagtaagctgggtaaaggatgcacagagtctttctgtacttattttttaaaactccatgtgaatctacaattatcttaaaatggaaagtttaatttaaaaaataaccttgcaaataaaaggggaaaaccaaagcgtgtgtaacaccttccctgtatgcatgctttctcagtggaaccacagaactgataagggaaattttctttttatggacatattccagctgacaaatttgatgggactggaatatccccatgtgtcaccttctgtgaggtgacagatctttacatgatcattgacagctgctgacatcacataataaggccttatgaacctcaggcagcaccacctctaaagcagtcttgccacaaaacatcaaacctggacctgatcaagcatctggattgattatggatatagatggacatagagaaaatatggatatggatatagagaaaatgcaggagacagacgagcaagggaaatgtctctgtgggacaaaatccacaaaatccagattgttggaaactctccaggacaaaagatctagattcttcaaaaacaacaacattgagaaaagaactgccagaaagaaaaaatacagaaggagaagataaattaaaagaaacatgagttatgccagccaagtacaatgaatggatctgttttggatccaggtacaaacaaactgtgtaaaaattttagaagcatccatatgacagctgagaaaatttgaacactgacttagtgtttgatgttattaagaaatttttaatattttagaggtgaaaaattgtattgtgggtataattttttaaaaatttgatatttgaaatttttttgtagatatatattgaaatatttatagatcaaattgtaaaaatctgaggtggccattcattcgtaattgttgaagctgggtgattagtacatggggggttactatattaggctttctacttttgtatacatttgaaatctattgtaaaactattttagaaaatataaacaaagtaatctaatattccccatgttggcctctgcaaaaataatatctcatgtaacttgggaagcttggatatttttatgcatggcataaaaatgacaatgtacatccctctcccctcaggacacagaacacatttgtgagtcttttcaccctcatctcgttggagattttattgggcaaagaaccttcagtaggcacgaaattcattctcacaagcagatggatacgttatgctccatttattgctcatcctaaattacaaacatttccagtgaatggaaaggaagatatgattgaaaaggactctataaagacaggatgtttctgtacagtcctcgtatctgctcacctattccaaactttccagacattttaccagaggtttaagacattctcctgagggtttgttgtagagggatttttcttaaataaggagtgcaagtagcaagcaatagcccacccaattggagataaaaaaaaaaagagtgtcagttttccccagtgttaaaaaaacaaaaaaggcatcaccctgcacatccctggcaattatacaaggggatgtacacagcccccacctttcctgagttcaaaaggaaggtgggttctgaaagaagaaaaggaagagtagatctctttggatctcttgacactcacagcaaagggattaaggtatctgagtcaactcttgaggcttctttgaattcagggatgaggagagaatatggtaagcttgacatcaggtcccagaagttttgagagaaaagaacagattgctctttgcaaaacaaaccaagtggggtgcatggagccccagtgaatgggaaacagagaagtcatcataccatgaaatggtctgaaatgtcaggtgcaccatcccttgtgagtaccaaatctgtgctccgcataaacttcttcacccagagtcaactggcaggggcaactggctcaccaggagacctagctatcctcttctccaggccctaattacacctccctgcaacagggactctgccatctaacagacaaggaggtgatttggttcccacatgtggctttttctgctgggtcccttgaggtccatggtaaccttttccccattctccataggccacactttatcataagattggaggcagagaacttcagcaaccacccccttgccctctggccctggggtcagggttactcaaacaatacctgctgcccaaacctggagaagtgtagattttgccactgatggaaggataatagctattgttgatacttaatcttgggggcctagaattcccactgttttcacaactcggagcttatttctaccagccctgtcagtgaggataaatgggcatgaataatgagcagaccagtttcccaaaagctcagacagtctgcagggaacatgtaatgagcagacagtgcagttcatgccggggagcccaggtttatccaggcctcatcctcactacctttctctactgataattggacccaacaggaccattctgagtcatttttccctcttcatttattcttcagttccactcaaaaggtcagcttagggcataaggtcaattaccttctgcaaggcaatcaggacaacagttacagaaaatgatagcagccttactcttcctgtaggaattaccagcttgtcagcctccaagctcatggagacaaagcatcgaaaagttagatccaggtgctcacctatgtgttcacttattctgtgtgtgtgtgtgtgtgtgtgtgtgacatttgttgtaaacgagagggcaggagtcagtgacacagtggtgcagagaataatcatattccctgccttcatggggcacagggcttggtggaggacaaagatgtgaattcagtaagtgccccaataaatattctcctacagttgaagaaaggtgatatgatgtaatgtgcaacagagacttttacatggtggggccctggcaggtctctctgaagctgaaactggcaggatgagcaggagttcacaagacagagaggggtgaatgtgttttccaaccacgtcttagcacaaactgttctctttgctgagagctgaaaaaagacagtgtgaccagagaccatcaggtaaggagctgaacatgagatatgacctgaacaggtggaagaaggtggtgagagacaaagaaaggagtacggtgcagtagagagggcacagaagctgatgtcagggtgtctcagtttggaaccactggcagccctgctcctctcccatgtggtcccaccatggtctctagggtctgggataagaggttaatgtgtacctcataccctaagtaggggtggtccctgcactttggcaaaaagttaaggaactaaagagatggaaatgaaaaaaaagataggatgaagacttaaaagaccaaagcccttggatgttttcttttttaatttttattttttaattttttatcaagacaagatctcactatgttgcccaggctggactcaaccttccagcctaaagcactccacccaccttggcctcccaatgtgctgggattacaacatgagtcaccatgcccagcctcctgggatgtttctcaacaaaacactgaacgccaagactggtttttgtgccacgtgccaacttcacggaagccagtctatgagctaccagctgcactcagcaattccagctccccaagctttggctcaattcccgtagatgcaccactgcttgtggcctgactctttgccacccaagtgcactcagcctcccctggggagtctgccaggcttgcatggctcctactacacttgctgtgctgggacctaaaacagtttttgtgcccctagcttgactccactgtatttatggaggctttgacctcctcagtggctgccctgggacagggaggctggttagcacaattaacacaacctggtcatgcaaggcattggtagtccataaggtgaactttgaccagtgagagacaggaaatggaaagaagccaacagaaaaatcacctggccttcctcccctatgacagagtgttctgagccacagtgttttacatgtcctccctggagatgtcccacatgacttgagcaaccaactggagctctggagaaactgcagccatgctgataacatatgaccttgtatttgctttctctccttcctgctttatttccctatgtcccttactttggttgttgggattgcacctcccaataaagcattagcatgtccgctctgcttggggctctgtttcctgggttaagactctgactcttgaatgctgaggcattgtattgagaaggagtccatgctggactcacacctggtgaacaagagtgctgtggtgcatgagtgagttcttccaaaggtataagaaaagatactcagtacctgtcaccccgaactattcttctgcagcaaatatgtgtttaaagtcagcagcccttaaacatacttgagatcacagatgaagcaacatcagactagctcccaacatagaaaagcacaataggaaagaaatatttggtgctgaaaagattatagctatgagaaaattaggcaatccctctgtgagaaccagcatgcactatggtaaaggttgaaaacagaagcgtggatacaattgcttaatagatataataatatgcataactgtgtgacaggcagtgtactaacaccctcatctttcatcccatttgctcatcaaaatagtaataaaaaggcatgcactttttttttttttgacaaagtcttgctctgtcacccaggctggagtgcagtggtgcaaattcagctcactgcaacctctacctactgggttcaagtgattctcatacctcagcctcccaagtagctggaattacagctatgccaccacacctgcctaattttttgtattttttttttttttttagtagaggtggggtttcgccatgttggccaggctggtctctaactcctgtcttcaagtgattcgttcacctcggcatctcaaagtgctgggattacacacatgagccactgcacccgaccaggcatgcactcttacaaacccttattttacaggcaagaaaacagggccagagaagttgggtaactagtccaaggccacaataagagtagcagagtcaggcttggagcccaggaagtatttcttcaagtttcatgcttctaacctgagtgctgtactgcctggtggagctctctgctaatcctaactttcaggcagaggtaagcattgctgatattatatgcctgttcctgagggctaataccaggagggagatcagacttttctgtctgatctgttgcttgtcccttccatgagtcttgggatcagaatcctgaattagagagagatggactctggccaaggtaggtatgatggtttgtatgtgtcccccagaaagcacgtgttggaaactgaatccccaacacaacagtgtcaggaggtggcgcctaatgagaggtgtctaggtcatggaggcaccacactcatgaatggattaatgtccactataaagaacttgaggctgtgagttccatctgttgctgtttatgtcttttgccctcttgccttctgccactggatgatttagtgagaaagctgccaccagatgcagccccttgatcttggactgcccagcctctagaaccacaagccaattaaattttttcttcataaattacctggtctcttgtattctgttatagcagcacaaacagtctaagacagtaagacagtagggaaacgagctccagatgtacttgaagcctctcgttcttattttaggaattaaagagcaatctccaccagtttccattagaaatgcttcttcttccatatcaaatattgtgggatagcctgaaacacctctcaatacttcatgacccttctccaaaattcaacagatatgatttctatggactttactcacaggggctccagtagaagaggaagaggcttgggtttaattgaaggtggcctcaggcatcagtgaggagcagctcctttggagacatatctcctacaaagaaagcatcagaattattatcctaatatgtggacatttgcggttccttcagcaccatcgaaatgaaaagaccatggggagatgcagggagagggctctgcacagcatagccaacttgtcaggttgaagacagacaacctccacggagcacggacttcaattagttaattccccacccccattgtcacttactaacatgggatgctgattaaaaattagattctcagattatctgtgagaagcttcacttataatttaagaacttttgctgtacaaccattgcaaaataattacataaagattaattagcaaattcccaaagcagtagtaaacagcaaagtagtttaattaagaccattatctccaaaatctgaacgttaataacagttgtagcccagagagaaatatgaggcacactggcacagagtggggtaaagggaggatgtcctttgacaccaacagtcggcccaagtctccacagctgctgtcctgctaattaaactccagaactctctggccactgcatcttgagaggacctgggctcctcctatgagcctctgcagctatagccttgacaaacatgtcattgtcggcctgcctccaagaacaggcctttacccctcaggagagagggaggaagcagggggagtgaacaagactttctagtggggaattcataaaatttagaatcgtcagaaaacatctgtaaccatgactcctgtctttcagaagacactgataaatttaacccaaccccttaacacaaactctgaagtaaaagtttggcaaaggaagccagtgggaatgaaatgtaacaatagcaactatgcagtcagcacacacaccgtacgatctcacacagtcaccagatcctctcgaagccacactgccttcattctgttattatttattcatttatgagacagggtgtcactctgttgccccagttagagtcagtgacacaaggtagtgtgcagtgctcagtgcagcctccaactcctggctccagtgatcctcctaccccagagtcccaagggactgggactacaagcacgagccactaagatcagctaatggtttttaatttgtgtgtgtgtgtgtggagacagggtctgactacattgcccaggctggtctcaaagtcctagcctcaaatgatcctcctgccgcagcctctcaaagtgctgggattacaggcatgagccactgtgtgctgccatattacctttattcttaagccaaagtcactcgcttagcctcgcacatggagagccttctcttttcaactctaaagcccatttgtttacctcgataccacagagatgccctttggtggtgcaacatttagcccattgaaggtggagactcaccattgtgtgagtctggtgtgaggtatagcctagacttgacaaagattgatttctccaaagaacccctttggcagggagatcccaaatcagagagcccttaccctcacccgggacagccaatgtctgtgcagctccacacggagcaacagctactgtggagaggttgacctggaccaatctaggacaggctgaggactgcccctccccaggcccttccatgtgtcagttcctgtcacaggggagggtgtggaagccacctctcatcagagatccacatcagctcatgcacctggctctggtgctgtcccacctcaggatcattccactttctgctgcagggccttgtctgatttcacaaagacctctaggtccacactaagagacagcccagaggtatggggtaggtgtttacaatggaggtgttgacagtcatcctcatcgtggaagccaccttctgactcactgcacccatcccagccatacctcctcatccagcggctatatgtcgatttgtctctcccctaatacaaggccctgccctccaccagcagagccagactgtctgcctgcaagcctggctttttattctgctgcactcagaaattacgcaaatcacaactattagtataacagcttctgcagaattcacaaagaaaagggaaaaaaaacactgtcacaaaatccctgtgcttggttaaaagaccgttaatttccccattatcctcactcactctcttgttaatatgagatgtgtgcatctgaagcctgcttttcagtcatatgaacatctataaaagagacatcagtcagcagaaacctctggaactgcaacatgaaagagaatgagggaaaagcccaactccagctagggtggagaagagaagaaaggcgagatgtgggaggtggccctggaaggcctgggcgggggtctctagaggaacctgggaagactctggtgtgggacaaagctccagatggactctgagcactctcgctgtcctggaggacagctgtctcactgttctggagggcctcattccccttctcattcatctcactcaccatgctagaagcctcccaagggcaagagctgcacacctgcacacctgcgccccatcccctccacagccctgagcaatgagcaggcacagagccagggcccggggaggccatggagaaattgagctcctttgcttgccatcatttcagagagaccacagtagtcttattccctgtgaatggattgagtttcttctatcaatcagggtccccaaaggaacaggtggcacatggacatcagaggattcaataacctgacaatttgcaaagatttcggcggaacagtgacagcagagatgaaggagcacatgatcccaggtgctcagaaggaggaagctgcctcgagagcagggactcagtcagcccgagcaacccagcagggaggacgcaggaggaatcaaggccctgtctccctcctcactccgtctgccttcctcccaagggccccctgggagctgagggagtagaggcaagttagccacctgggccatgcctccaggtcccctcctgaggcacagagcaaggcagaaaagcttctgggccaggctctggcagcaccagttggatttcctctgtaagatgaagacaatggtcctgggagagcacagctgaccacctagcaccctgggccatgtcaccttccagctcacctctcatctgaggtccacaccagcttatgcacctggctctggtgctgtcccacctcgtgatcattccactttctgctgtgaggctctgtctgatttcacaagagaactctaggtccacaataagacagcccagaggtatggggtaggtgtttacaatggaggtgttgacaatcattctcatcgtgcaagcctgggcattcagaggcattcatattaggcctagcccaggtgttcacagccattctcatcagggccagcccaggtgtcgctgctatcctcactaggcccacctcagatgttcacaactgacctcattgggcccatgcaggtgttcatagccatcctcatcaggacgagcccagggttcatagctgccctcaccgaggtttgtttatattttcatataacattgtgaaaaactggcttggggccactgagtatagctgtgatcacctgagtttggcccaatgaggacagctgtgaacacctgtgctaggcccaatgaggacagctatgaacatctgggctgggccccaagactacagctgtgcttattggaccctgatctggtgctcttagccatcttcattgagaccagcctaggtgttcacagcttttctcattgggtccagcccagttgttcatagctattctcatcagggtcagcccaggtattcacagctggccatggagctcagccaagttgttcacagctgtcctcatgagacccagcctggtgtttaccaccccctccctgagttcagcccagttttttacatccatcttcactggggccagcccaggtattcacagctgtcctcattgtgccaagccaaggtattcacagctgtcctcatgggggccaggtgaggtactcacagctgttcctttcaaggccaacccaggtgtttactgctgtcctcattgtgtccagcccaggtgttcataactgtcctcatggggttcaggtgaggtgttcacagtgatgctctttggagccagccaaggtgttcacagccatccacattggcttcatccaagatgttcatagccatccttattggagccagtgagtttgttcacacccatgctaatacgtgtcaaccaaggtattatagctacactcatctgggtgagccaaggtgttcactgctatcctcactggggcccagcccaggtgttaatagttgtccttatgggcccagcccaggagtttatattggttctcatcagggcaagtccgggtgttcagtgccatcctattgggccctgacctggtattcagagccatcctcactactccagcccaggtattcacagtcgttctcatcagggccttgtacgtgtgctcatagttgtcatcattaggtgtttatgggtaagtccaggtgttcagagccatcctattaggcccagtttaggtgttcagaatcatccttgtggtgcctagcctagaagttcccagctgtaattatcatagtcagccagggtttccacagtcatcctcatcaggaacagccgtggtgttcacatccatgctcactgggcctagttaaggtattagaaccatcttaatcatcagggccagatcaggtggtaatggcagttctctttagtgccagcccagttattcatagccattctcattggaaccagataatctgttcacaaacattctcattggggccagccaaattatgatagccatcctcatcagggccagctcatctgttcacagctgtcttcaccgggggcagcataggtgttcacagccatcctcaatgggtccagccaaggttttcacagctgtcctgattgggcccaccccagaggttcacagctgtcatcataggacccagcaaagaagtacacagctgttctcattgagctcagcccaggtgggccagtgccaattagtgtgactataataccttgcctggacccaactagcatgggcaggagcaaattggctgaccccagtgaggatggctatgaacatctgggttggtggcagtgtggaaaaatatgaatatcttggctggccccaaagagaaccaccgtaaacatctagacaggccaaaatgaggaagttttgaagacagccatgaactcctgggctggctacgatgaggacagttgtgaacaactgagctgggccaaattaggacagctgtaaacactcatgctaggctcaatgaggacagcagtgaacacctatggtggccaatgaggtcagatgtgaacaactgggttggcccaataaggacaacagtgaacacttggcttatccgcatgaggacagcttggaacatccgagctgatcttgataaggactactgtgaatacatagactgaacccaataacaacagctattaacaccttgactagttccctatgagaaccactgtggacacctgggcttgcccccaatgaagatagctatgaacacttgggctgacctcaatgatgacaactgtgaacacctttgctggcactgatgaggaccattgtgaacatgttggcttgcagtaatgaggacagatatgaacgcctaggctggacccagtggaaagagaagtgaacacctaagctgacccaacaatgaaaattgtgaaaaactggcttggagccactgaggatagctgtggtcacctgagtttggcccaatgaggacagctgtgaacacctgggctaggcccaatgaggacagctatgaacatctgggctggtccccaagactacagctttgaacaaatgggccgaccttgatgaagatggctgtgtacacctggggtaggcccagtgaggacagcaattaacacttgggctttgcctgtatgaagtaaactgtgaacacttgtgctgactccaatgagcctggctgggaagacctgaactggccccaatgaggatggctataataccttggctgggcccagtgaacatagatgtgaacacttaggcaggccctgatgaggagcactgtgaacacctaggctggtcctaattaggaaaactgggaacacttgggcagggcccagtgagaatgggctatactcagtgatgaaaactgtgaagaactggcctggatcctgtgaggacgaatatgaacacttgagcgtggaccagtgagaaaggctttgaacacctgggatggccacaatgatgatggctgtgaacaccttggctggcctcagcgagtgttgctataatagcttggctggccccaattaacatgggtgtgaacaaataggctggacctaatgaggatggctgttaacacctcaggtgtctcagttgaggatcactgtgaacacctgagcaggctcagatgaaaatagctatgaacacctaggctggtcctgatgaagacagctaggaacacctgggtgaggcccagtgaggatagctattaacacctggctggctttcatgaggatggctgtgagcacctggtctggccactattaaacagtctctggacacctaagctgggcccaatgaggacagctattaacacctgggctggcccaataatgaccgttgtgaacactaacccagataaggatggctatgaaaatttgggctggcatctaggtagatggctgtgacctcccaggctggccccagtgaggatggttctaattctttagctggcctaaaagagcatggatgtgaacacctgggctggtcctaatgaagacaactatgaatacctaggataacccccaataaaaacagctgggaacacctgggatggccttcattaggaagtctccaacacctggactgggcctaataggatggctctgaacacctggacttgccctggtgaggacctctgtaatcacagtgctgggcccaatgaggacaactattaacacctggtctgaaaactggtgaggagtgctctgaacacttaggctgaacctgaggaggatggctgtaaacacctgacctgacctcaatgaggacagctgtgtaaaactgggattgacctagtgaggacagctgtgaacacgtagactgatcctactggggacaatggtgaacatctaggctaagcccaatgaagatagctctgaatacctggacatggctcctatgagataaagtgcaaatgcctgggcttgcccaatgtggacagctatgaatacctaggctgagctcaattatgaaagctgtgaacacatgggcttggtccagtgaggacagtggtgaacactcaggctggccctcatgaggacagctgtgaacactttgtctgggccccatgagaacagcagtgaatacctgggctggccaaaataaggtaaaacaactgagctaaacccaatgagaatggctgtgaacacctaggctagacaccaagaaaatagctttgaacacatgagctgagctccattaggacacctgtgaatacttggcctggcaccagtgaaaacagctatgaacaattgggctaggctcagtgaggatggctataaacacctatgctgaactccatgagatcagctgtgaacacctggctataataccttggctggccccaattagcatgagggtgaacacattggctggccccaagaagaatgactatgaacacctgaactggcaccatgtgaatggctgtgaccacctgggctggcaccaatgaaaacagctgtgaacaactaagctaggcccaatatgaatggctctgaacacccaggcttgcacaataaggatgactatcaacacctccattagccccaatgaggatggctgttaacacctgggctggctctgataaggacaactgtgaacacccagcatgagcccaataagaacagtggtgaacacttaggctaggccaaataaggtcagccgttaaaacctgggctggccacagcaaggatggctgtgaaaacctgagctggacccaaaggaaacacctatgaaaaactgggttgtggggtagctggcaagatggccgaagaggaacaattccagtctgcagctcccagtgagatcgacacagatgacagatgattccttcatttccaactgaggtacccagttcatctcattggtactcgttggacagtgggtacagcccatggaaggcaagccaaagcagggtggggtgttgcttcatctgggaagtgcaaggggtcaggggatttccctttcctagccatgggaagccttgagagactgactgtaccaggaggaatggtgcattccggcctggatactgcacttttcccgcagtcctcaaaaccagcagaccaggagattctctcctggctgttttcattaggggttatgctaggtattcatagttgtcttcattgggaccagcccaggtgttcacatccatgctcttttaggccagctaaagaattagaaccatcctcactggggccagcctgggaggtcacagccatctacctagatgccagcccaaattttcatagccatccttatctgggttagtgttcacaacggtcattattgggccagcccaggtgttaatagctgtcctcattgggcccagcttaggtgtccagagactgtttaatagtggccagaccaggtgctcacagccatcctcatgaaagccagccaggtgttaatagctatcctcactgggcctcacccaggtgttcctagctgtcttcatcaggaccagcctaggtgttcatagctattttcatctgagcctgctcaggtgttcacagtgatcctcaactgagacacctgaggtgttaacagccatcctcattgggtccagcctggttcagtgggttctaccccaacagagctcaacaagctaagatccactggcttgaaattctcactgctccacagcagtttgaggtcaacctgggatgcttgagcttagtggggggaggggcatccatcattgctgaggcttgagtaggcggttttaccctcacagtgtaaacaaagctgccgggaagttcaaactgggcggagcccactgcagctccctgggacaaaacacctgtgggaagactgtgggtacagcttcaaccgacttaaacgtccctgcctgacagctctgaagaaagcagcagttctcccagtacagcgttcaagctctgataagggacagactgcctcctcaagtgggtccctgacctccaatgtgtccagactgggagatacctcccagtaggggctgacagacacctcatacaggagcgctctaactgatatctagggggtgcccctctgggatgaagcttccagaggtaggaacagggagcaatctttgttctgcagcctccactggtgatacccaggaaaacagagtctggagtggacctctggcaaactccaacagacctgcagcagaggggcctgactgttagaaggaaaactaacaaacagaaaggaataatatcaacatcaacaacatcaaagacgaaaggtagataaatccacgaagatgacgagaaaccaacacaaaaaggctgaaaattccaaaaaccagaacgcctcttctcctccaaagtatcataactcctcgccagcaagggaacaaaactggacaaataataagtttgacgaattgacagaagtaggcttcagaaggtggttaatgataaactcctttgagctaaagaagcatgttctaacccaatgcagagaagctaagaacctggataaaagtttggatgagttgctaactagaataaccagcttacagaagaacataaatgacctgatggagctgaaaaacacagcacaaaaacttcttgaagcatacacaagtatcagtagctgaactgatcaagtggaagaaagtatatcagagattgaagatcaactcaatgaaataaagttagaagacaagattagagaaaaaagagtgaaaagaaatgaacaaagactccaagaaatatggacaatgtgcaaagaccaaatctacatttgattggtgcacctgaaagtgacgaggagaatggaaccaagttggaaaacactcttcaggatattatccaggagaacttcctcaacctagcaaggcagaccaacattcaaattcaggaaatacggagaacaccacaaagatattcctcgaaaagagcagccccaagacacataattgtcaggttcaccaaggttgaaatgaagaaaaaaatgttaaaggcaacctgagagaaaggttgagttacccacaaagggatgccaatcagactaacagctgatctgttggcagaaaccctacaagccagaagacagtgaggggaaaattttcaacattcttaaagaaaagaattttcaactgagaatttcatatccagccaaactaagctccgtaagtgaaggagaaataaaatcctttcagacaagcaaatgctgagagattttgtcaccaccaggcctgccttacaagagctcctgaaggaagcactaaacatggaaaagaacaaccggtaccagccactgcaaaaacataccaaattgtaaaaagcatcaacactatgaagaaacttcatcaactagtgggcaaaataaccagctagcatcataatgacaggaccaaattcacacataacaatattaaccttaaatgtaaatgggctaaatgcccaaagacacggactgggaaattgaataaagaggcaagaccaattggtgtgcccatctcacatgcaaagacacaaataggctcaaaataaaggaatggaggaagatttaccaagaaaatggaaggaaaaaaaaattaagggttgcaatcctagtctctgataaaacagactgtaaaccaacaaagatcaaaaaatacaaagaagggcattacataatggtaaagagatcaatgcagcaagaagagctaactatcctaaatatatatgcacccaatacaggagcacccagattcataaagcaagttcttaaagacctacaaaaagctggagaggatgtggagaaataggaatacttttacactgttggtgggactgtaaactagttcaaccattgtggaagtcagtgtggcgattcctcagggatctagaactagaaataccatttgacccagccatcccattactgggtatatacccaaaggactataaatcatgctgctgtaaagacacatgcacatgtatgtttattgcggcattattcacaatagcaaagacttggaaccaacccaaatgtccaacaatgatagactggattaagaaaatgtggcacgtatacaccatggaatactatgcagccataaaaaatgatgagttcatgtcctttgtagggacatggatgaaattggaaaccatcattctcagtaaactatcgcaagaacaaaaaaccaaacaccgcatattctcactcataggtgggaattgaacaatgagatcacatggacacaggaaggggaatatcacactctggggactgttgtggggtggggagaggggggagggatagcattgggagatatacctaatgctagatgacgagttagggggtgcagcacaccagcatggcacatgtatacatatgtaactaacctgcacaatgtgcacatgtaccctaaaacttaaagtataataataaaaaataaataaataaataaataaataaataaataagacctacaaagagacttagacgtctgcaaaataatagtgggagacttttacaccccactgtcaatattggacatattaacgagacagaaaattagcaaggatattcaggacttgaactcagctctggaccaagtggacctaatagacatctgcagaactctccactcgaaatcaacagaatatacatttttttcagcaccaaatcacacttattctaaaattgaccaagtaattggaagtaaaacactcctcagcaaatgcaaaagaatggaaatcataacagtctctcagaccacagtgcaatcaaattaaaactcaggattaagaaattcactcaaaaccacacaactacatggaaactgaacaacctgctcctgaatgactactgggtaaataatgaaatgaaggcagaaataaagatgttctttgaaaccaatgagaataagacacaacataccagaatctctgggacacatttaaagcagtgtgtgagggaaatttatagcactaaatgcccacaagaaaaagcaggaaagatctgaaattgtcaccctaacgtcaaaattaaaagaagtagacaagcaagagcaaacaatttcaaaagctagtagaggacaagaaataactaagatcagagcagaactgaaggagatagatacacgaaaaacccttcaaaaaatcaacgaatccaggagctggttttttgaaaagatcaacaaaatacagagactgctaagcagactaataaagaagaaaagagagaagaatcaaatagatgcaataaaaaatgataaatgagatatcaccaccaatttgacaaaaatacaaactaccatcagagaatactataaacacctctatgcgaaaaactagaaaatctagaagaaatggataaattcctggacacatacaccctcccaagactaaaccaggaagaagtagaatccctgaatagatcaataacaagttctgaaattgaggcagtaattaacagcctaccaaccaaaaaaaagcccaggaccagatggattcacagccgaattctaccaagggtacaaagaggagctagtaccattgcttctgaaactattccacacaatagaaaaagaaggaatcctccctaaactcattttatgaggccagcatcatcctgataccaaaacctggcagagatacaacaaaaataaaggaaaatttcaggcccatatccttgatgaacatcaatgcgaaaatcctcaatcaaatattggcaaacccaattcagcagcacatcaaaaaggttatccaccatgatcaagtgggcttcatccctgggatacaaagctggttcaacatatgcaaatcaataaacgtaatccatcacataaacagaactaattacaaaaaccacataattatctcaatagatgcagaaaaggcctttgacaaaattcaacagcccttcatgctaaaaactctcaataaactaggtattgatggaaagtatctcaaaataataagagctatttatgacaaacctacagctaatatcatactgaataggcaaaaactggaagcattccctttgaaaactgacacaagacaaggacgccctctctcacttctccttttcaacatagtattggaatttctggccagggcagtcagacaagagaaagaaataaagggtattcaaacaggaagagaggaagcatattatctctgtttgcagatgacatgattgtatatttagaaaaccccattgtctcagcccaaatctccttaagctgataagcaacttcagcaaagtctcaggatacaaaatcaatgtgcaaaaatcacaaacactcctatacacaaataacagacaaacagagagccaaatcatgagtgaattccagttcacaattgctacaaagagaataaaaaacctaggaatacaacttgcaagggatgtgaaggacctcttcaaggagaactacaaaccactgctcaaggaaataaaagaggacacaaacaaatggaaaatcattccatgctcatggataagaagaaacaatatcgtgaaaatgtccatcctgcccaaaataatttatagatttaatgctatctccatcaaactaccattgactttcttcacagaattggaaaaaaactactttaaacttcatatggaaccaaaacagagcccacatagctaagacaattctaagcaaaaacaacaaaactggaggcatcatcctacctgactttatactacaaggctacagtaaccaaaagagcatggtactggtaccaaaacagatatatagaccaatggaacaaaacagaggcctcaaaaataacaccacacatctacaaccatctgatctttgaaaaatctgacaaaaacaagcaatggggaaagaattccctatttaatagatggtgttgggaacactggaatgcagaaagctgaaactggatcccttccttacaccttatacaaaaatttattcaagatggattaaagacttaaacataaaacctaaaaccataaaaaccctcgaagaaaacctggccagtacctttcaggacacaggcattggcaaagccttcatgactaaaacaccaagggcaatggcaactaaagccaaaattgacgaatagaatctaattaaactaaagagcttctgcacagcaaatgaaactatcatcagagtgaacaggaaacttacagaatgggagaaaatttttgaaatctatccatctgacaaaggactcatatccagaatttacaaataacttaaatttacaagaaaaaaaacaaacatcctcatcaaaaagtgggcaaaggatatgaacaggcatttctcaaaagaagacatttatgcagccaacaaacatgaaaaaatgctcatcatcaatggtcattagagaaatgcaaatcaaaaccacaatgggatatcatcttgtgccagttagaatggcgatcgttaaaaagtcaggaaacaacagatgctggagaggatgtggagaaataggaatgcttttacactgttagtgggagtgtaaattagttcaaccattgtggaagacaatctttgttgttctgcagcctccactggtggccattcctcaaggatctagaactagaaataccatttgacccagccatcccattactgggtatatacccaaaggattataactcattctactgtaaagacacatgcacatgtatgtttattgcagcactgttcacaatagcaaagacttgaaaccaacccaaatgcccatcaatgatagactggataaagaaaatgtggcacatatacactgtggaatactatacagccataaaaagggtgagttcatgtcctttgcagggacatggataaagctggaaaccatcattctcagcaaactaacacaagaacaaaaaaccaaatactgcaagtgggaattgaacaacaagaacacatggacacagggaggggaacattatgcactgaggcctgtgggggggtggggggtgaggggagggatagcattaggtgaaatacctaatgtagatgacaggttgatgggtacagcacattctgcacatgtaccctagaacttaaaacaaacaaacaaatgaataaacaaacaaaaaaaaactgggttggacacaaggaggatggctgagaacacctgagctggccctgatgagaatggatgtgatcacctgggctgccctgatgagggtggccctacgatattggctgcacccattgagcatgaatgtgaacacctaggttgtccctgacaaggaccacagtgaacacctaagctgcccccgataaggaaagcctggtctggcccccatgaggaaggctttgatcacctaggaaaggcacaataggatggttgtgaacacctgaagttgccctgagatggacctctatacaactatgtttatagtcatgaaaacatgtgaactataaacatgtgaactgggtcagagaagtatcacggtgaacacttaggctggacccagtgaggagagctatgaacccctggcctggcacaatgagaatgtctatgaaaacctgggctttgcccagagaggacggctgtgaaaacctggattgacccctaagaagaggcttggaacatgttggctggcctgcttgaaggcggctatgataccttggccagccctaatttccatagctgtgaacaggaggactggccctgatgaggatggctatgaacatttgggatggtgataatgtggattgttgtgatgggctgagctggctcaagtgaggaccactgtgaacacctgcaaaggcccagataagaacagctatgaaaacctgggatgctcccagtggagacagctatgaacacctgggctgggctgagtgtggacaacagtgaagacctgggttagctcagatgaggacagctatgaataccctgccaggccccgatgagggtgaccttaataccttgattgacaccagtgatccacattaggacagctgtgaacacttgtgctggacccaataactacatcagtgaacatttcttggggctggaccagatgaggacaattgtggacacctgggctgggctcaaaagaataactgtatattagggctgggtataacaaagacagctttgaacatgtgggctgtaccctatgaggagagctttgaacacctggactgacacctattagaatagctgtgaatacctccactgggactaggtctctatatgaactactttgtacacctgtcctggcccaatgaaaatagcactaaacatttacattggccctcatgaagagatctttgaacacctgggctttctctgatgatgatggctgtgaacacctgggccatcctcactgggcacagccaagtttttcatagctgtcctaactgaacccagcctaggtgttcacagctgtcatcattgggtgtaacctgggtgttcacatctacccttatttgggcctagcccaggtattcaaggtttcctcattgggcccagcacaaacatacacaactatggttgtgggcccagccctggtattcatagccattgacatcggggccagcccaggtgtacatgaccattctttccagggccagctaaggtgttcatggctgtcctcatggggccagcccaggtgttcacagctgttctcataggtcctatcccaagtattcactgctgttctaatgcggcctagttcaggtgttcactgctgccctcattgtacccagcccacatgatcacagatgtcctaatagggcccagcccaggtattcactctaaaacctggccagggcccaatgaggacagctgtgttcatctaggctgggccccatgaaggcagcctggaacccctggcttgacccagggaggattgctgtgaacacctgggctgccccaatgagggtggctatactataggttggctggccccaaagatcatggctgtgaacacattggctgatcctgatggggatggctatgaacacctgggctcagcccaatgaagatgacgacaaacaccttggctggccccaatgagaatgacaatgaacaatttcctgggccaaaggaggacagctgtgaacacatgaggttggcccaatgtggacaggagtgaatacctggttgtcctagatggggacagctgtgaacacctaggcttgcccacattaggacagctatgaacacctgggatgggcccagtgacactagcagtgaattcctcagctggatttgacaaggatggttatcaacacctggactggccccaacctagatggctatgaacacctgggcatggcccaaaagcttaactgagtacatctggcctgggcacaatgaggaaaactttgaaacatctgggctggtccctgtgaggacagatttgaacatttggacttaccctgatgaggacagctgtgaatactttgactggccctgaagagaacagccatgaacacctggcctgggcccaaggagaacagctatgagaaaacctgtgactggccaagaaaggaccactgtgaacaccttgcctggtttcactgagggtggtatcctatttgggctggccccaattagcatgagtgtgaacaaattggctggctccactaagaattgctatgaacatctgagctggtgctaatgtggacagctgtaaccacctggattggccccactgaggaccaaatgtacatttatccttttgggcccagcccaagtgttcatagccacctaagctgaggctaccccaggtgttcataaccatcctcatcaggtccagccccttgaggtgttcactgctatagtcattgggtccagcccaggtgttcatagccgtcctaatgtggacaggcccaggtgttcacagctgttctcatctgggacagccaggtattcactcctattcacattgggtcaacctcacgtgtttacagctgtcctctttggacccaggaaattgttcattgccattctcattggagcttcccagatattcaaagccattctcatcaaggcatatctggtttttaaagctgtctgcattggccctgacaaagtattcacagcttttaaaatattggccagtgcaggtgttcacagctgtcctcattagagccagcacaggttcttacagccatcctcatccgagccagcccaggaattttcagtccttcacatggggacccagtccagtgtttaatagttgtcctcactgggctgagcccagatgttcacagccatccaaatactcattagggcaagtccagatgttcagggccatcctattcggccctgccctggtgttcagagacatcctcactggcccagcccaagtcttcacagtcgttatcgtaggggacttgtacatgtgttcatagctatcatcattaggtgtttatagtggttttcatctgggtgagtccaggtgttcagcactatcctattgggcccagttcaggtgttcagaaccatcctcaagatggctaccttaggtgttcccagctatacttaccatggccagcctgggtttccacagtcatccttatcaggaacacccctggtgttcacatccatgctcactgggcctagccaaggcattagtgccatcttcatcattgaggcctgaccaggtattagggcagtttattttagtgccagcccaggtattcatagcgattcttatcgggaccagccaatgtgtttacagacctcctcattgggaccagccaaattattatagccaccctgatcaaggccagccaatttgttcacagccattcttctcagggtcagccaacttgtttacagctgtccaatgggcaacctaggtgttcacagctgtcctcattgtgcccagccaagatttttatagttgccctgattggacccaccccagagggtcacagctatcatcataagacccagctcagatgtacacagctgttctcattgggctcagcccaggtgggccagtgccaatgagtgtgactataataccttacctggacccaattagcacgggcaggaacaaattggctgatcccagtgaggatggctatgaacatctgggttggtggcagtgtggaaaaatatgactatcttggctggccccaaagagaaccactgtaaacatctgggcaggtctagaagaggaaagctctgaagacagccatgaactcctgggctggctatgatgaggacagttgtgaacaactgagctggaccaaattaggacagctgtagacactcatgctaggctcagtgaggacagcagtgaacacctatggtggccagtgaggtcagatgtgaacacctgggctggcccaataaagaaaataataaacacataggcttgttcccatgagggcagctttgaacacctgagctgatcttgttgaggacaactgtgaacacataggctaagccgtataacgacagctattaacaccttgactaggcccctgtgagaaccactgtgccactgtgaacaccagggctagcgccaatgaggatggctatgaacacttgggctgaccttgatgatgacaactgtgaatggtaccaactttgctggcactgatgtggaccactgaaaacatgtcagcttgtagtgatgacagatgtgaatgcctaggctgggcccattaaagagatcagtgaacacctaagctgacccagtgatgaaagctttgaacacttggcctgaggccaatcaggatagctgtgatcacctgagtgatcgcaatgagtacaaagctgcccaatgagcacagctttgaacaactgggttgaccttgataaggatggctgtgcatacctgggctgggcccagtaaggcatcaattaacacctgggctttgcctatatgaagacaactgtgaatacttgtgctggctctcatgagcgtggctgggaacgcctgaactggctctgatgaggacggctacaataccttggctgggccctgtgagcatagatgtgaacacttgagcaggccctgatgaggaccactgtgaacatctaggctggccctgattaggaaaggtggaaacacctgggctgggcccagtgaggatgactgtgaacatttaggctgtacccaatgaggatagctgtgaagaactggcctgggtcccatgaggacaggtaagaatgcctgggcttggccctgtgaggacagctttgaacacctgagacagcccagatgatgatggcagtgaacaccttggctggtcccagtgagtgttgctataatagcttggctatacccgattagcgtaagtgggaacatataggctggacccaatgaggatggctatgaacaacttagctaggcccaatgaggatggctgtcaactcctcagctggctctgatgaggaccactgtgaacatttgggcaggcccagatgaaaatagctatgaacacctacgctagtcctgatgaagacagctaggaacacctgggtgaggcccagtgaggacagatatgaaacctgggcttgctctcatgaggatggctgtgagcacctggtctggccactattaaacagtctctgaacacctaagctgggcccagtaaggacagctattaacatctgtgctgcccaatgatgacagccgtgaacactaagccagataaggatggctatgaacatttggggtggcatcaaggtagatggctgtgacccgccaggctggccctgataaggatggctctaattccttggctggcccaaatgagcatagatgtgaacacctgggctggtcccaatgaagacaactgtgaatacctaggataggcccgataaaaacagctgggaacacctgggatggccttcattaggatgtctccaacacctggactgggcccaataggatggctctgaacacctggacttgccctgatgggaacctctgtaaccacagtgctgggcccaatgaggacagctattaacatctggtctgaaaactagtgaagagtgctctgaacacttaggctggacctgatgaggatggctgtgaacacctgacctgacctcaatgagggcagccatgtaaaactcggactggcctagtgagtacggctgtgaatgcctgggctgatcctgatgaggacgacagtgaacatgtaggctaagccccatgaatacagctctgaaaacctggacattgctcctatgaaaatgattgtgaactcccgggcaggcctcagtgccctgtggacctgactctggggagaccaaagtagccctctgagacctgcaccctgccccagagagtccccgcatcctcacctctgtgccttcccagtgacccccgcacctctgcctgtgttgcagattcctctaacatgaaagagtcatgatgtggggatgtcaccctggcccagaaaggatacaaatcatgatgctctggaagattttatttagcaatgtcttgtatatagctgatgttatatttgttgttcttttatttgttgtttttatagtggctttatttgttacgtcattatatttgtcttgctatattatttgttgtcttctatatttgtttaaagttacatattaagtaatagttatccccttctaattgcttatagaatattttcctgtgaaatgaaacccatgataggaaatctccctcagcagagctaggactcactgaattagaaagcagtccctccagtgactgccactctctctcttatgtcttcctaatttcatcttaattggccgaagtaccagcaaatacaccctcactcattgtctttacatcagtgtccttcgagagattgttgtctgaaatctgttccttcctctggaagggatcctgggaacaaccttccccacggtctccacagtgacttagctgtcagggcctttcctgccccatggtcagcacagctggtgtgagcttcctggctcactggcgctttccctgagtgtcttcagaatttttctccatttttttccagcatagagtatttcttgctgagaggtggatgagagtctaattttcacttctttgtgtattactcactcttctagtctagatgctttaaaaatgcgttttgtcttcaagttcaggagtttactcaaatatcatttgctgttagccatttcacatcaatcctcagtattcttttgaagaaacacttacaaaacattgtttttattttcagaaaaaattggaatgatcgttgttcatatttccttgtgtctttgctttgattgttctcgttcaggcaccttaatcatgcatccatttggctactctccctaaacatttataacctcttgctcattttcttttgaaatattctcctcactttaaccttctgtttcttagaaggcagaagctgtcattgtgttgtctctagtttacattttatagctgaagagtgtttccaattatttttcttagtctttttggagtttcatccatgcattgctctatttctttaattctgatgaatggtgtccttttgtgtttgatattattttcttaatgcctttgatctcattgttgaaaaggccacagtccagtgggtgagttacattgaggtgggaactttcacattttctagtggttttactctataagtattcattttgtctattacatgtctttgtatgagaattggcatcaatatatttctgttgctgatttttatatggattttgtcttcatgaatttgtaatgagcattataattcagaaaccttttccaacctcatagagcttctctctctgaaatctctgtgcagtgctcacaactatgacaccggtttcctggaatttcctgcctctgtgcttctccccttctgtaacaggagcctcctccctggtttcctccactgcactccaatcctctctttggaacctgcaactgaatattgctcctaaatgggaagactgtcttgcaaggggacaactgccacaatattgccaaaatgtaagctgattcactttaagtgcatattcactttccagatcattttgttcttttctgttatatatctgaaaaccggtttcttctctgacttattttatttatttttatttgtcagtattttattcttatgattatcaatttttacttttttgtgtatttaagattttttgtattttgatgtttatatttgagtgattttagacttaattttcacatgattttagatgtatctcttttcaaagtgatttgttgtttgctgtggggatttatctttaggtattgggtggttgttatttattttgaatccagtagattcccagacatgcagggtcatgtctaactgggccacaaactctttctgcctcttgacattttcaggcatagacaacaggctcttcacagtgcactgtggatgtcacaaaatccccataaattgtccttaaattattgcccatgttttattaaaaagtattatttaggaagtaacctctgaaaagaaagaactcttttaattttctttactaatatttaaaaatttagtccacatataaaagcatgtctgtcatattatgccccaaatcctcttattgagcaattggaaaacatattcctaagctgaggcttacagtcattgctcgttatctgcaggggttggtttcaggacccccacagattccagcatctgacaatgctcaagtccctggtataaagtggcacagcatctgcatataagccatgcccgtgctcctgtgcacttgaaatcatctcagatctctcctcaaccccataggcaggaactgctatgcaaatagttgttatcctctctgccagcccctacctccacctaccttgtcttatgcctctcttccatgtgacttttcctgagctgcattttttaatatgaaataaacctgtacatatgagtagagtgcttttctgagttgtctgattcattctggtgaacctgagggaggtgttgtgggaactcctgaattggtagtctgccaggaagaagcctcggcagctaggccaccccattggttgctggcatctaagtgaggacagtgctgtgggaccgagcacataatcataggcctgctggccatttgtatgtcattttttgagaaatgtctcttcaggtcatttgaccatttttaaagagattattttgttttgctgttgactcgagttccttatatagtctggatattaatttctcattcgatggatagtttgcaaatattttctcccattctataggtcatctcgtcactcccttgattctttgctgtgcagaagtttgttagcttgttttggtcctatttatgtatttttgctcttctcacctatggttttttttaaaaatctcagcccagaccaatgtctagaggaatttctcaatgttttcttttagtagtgttatattttcaggttttccattaaagtctctaatccatctggatttgcattttgcatataataagagataggggcccagttttttctctacctttgaatgttcagttttccccttatttattgaagagactcttctttctttaatgtatgttcctggtgcaggtaggaacggagtgctagtaggagctgggtgcatggctcgagtaggagcaggagcagagtgctggtaggagctgggtgcacagcacaggtaggagttgggcacgggtaggagtggggtgctggtagaaggtgggtgcacggcatgggtatgtacggagtgctagtaggagccggatgcatggcatgggtagcagcggagtgtcaccgcatgcctccctggaggacctgtcgggactgtggccccaatggcagcctggccctgcctcaatggcctgggctctgaactgcaggatctcacaggtggaagaaaccttggagacccgcagcccccagggccatggtggctcccaacaggggagggccacccaaagccccctcccatggtgcccttgccaaggagtccctggatgggcctgtttagactcctttgatgatggggcccccatgaccccaggacagccctgaccatctcttactcactgttgaccttccttcagaccaggagatgcacaatatttgccaataggaatctcccatcttcccttaattcaactgtttcactgacatcccacaagcaccaccccccatcaggtgcccttaacctgtgtcctcgaccccattgaccttcagaaggcctcacccatccagtggctccatggcagaacaggtctcccagagcccaggccatggagcagagcctcccgtggcaccaacagtggcagcagtacctgtgcatgctcccatgtcctgagcatggactctggacagagcaaggtcaggctgcaaggctgtctttagtcagggcctgaccctaggacagtgtggaaacactggaatggtttcagaaagggatggacagcattggatttgaggtccttaaaagtgactttgggtactgtgtcgagagtggatggactggcaggagtgagaggctcagggcaagtgaggaggcagctgaagaactcaagaggcagtcaaagggggactcgagggtgggaggaacaggcacatctgttcacagctgtgcctcagaagccctgtgtttcacacacttgccgatttcagaaagggccatccatcattctcatgaagtgtctactcattctgaaagaactcatctagatcttgagtggctgcctgttctttccccttagagttacaattatcattttcatttacttccaactaataaatgcaagtggctgattctgatgagacctgtttcatttcctgcttgaaagtctagagcaagaatacttagctcagagactgaaagtctagagcaagaatacttagctcagagactgatctggatgaggctggggaaggagaccaccagagcttaaacgaagccactaaaagcagtaagagaaacaactgtgaagcctgtgagaaaagcagggtgtgtttctgataaggaaaggtattaagtgtgaaggaaatgtttttattaaagaaaaagtactttgtccttaactaaaatgattcgttactccagaatgaaaaaaaaaaaagagtagggcaaaatataaatggacatagaaagttgtagaaggtttgtggaaggcaaatgcatatgtggtgaagccagtaagattagatacatttatttataaaattcattaaatgtggccaatagtgtaccgatgcaaaactagaatttctatttctgtctgttaaaacaatggtttcttagattgttggtcggctttttaaaaagattgtaaaaagtttttctttaccttttaaattatttgcccaggaaacaaagattttgtatctaatcatcataatttcttgggcttaatgttaacctttatcaggtccttgcttatgtaagagaattagtgctccttacttttaaaagtgcctctcaaaagcagatcctagatgaaactttcttctccaatggtcttgagatttcccagagggatttagaaaaacctgagagaatttgttctttcatctcatgaggagatatgttcaaaataatgtggtttatttgataagttcagttgcctggaaagatgatgtcaaataagaaacaaaaaccttcccttggttttatttgcatgggtagaaagtattaacataaatatttcagaaattgtatgaaattcctagaaatgtgtcagtgtctctactgctcataatgtgtccgggtatgttatcagtcataattccagctgttacttttaaatgttgcatgccatggaaatcacctaaatcccttgtgaattgcattatttttataatgaggtctcaataggcctttaatatggtcattttaagtcttgtcattcacagattttgttattctcttattcttctttaaaatattttcagttaccagccaaagtggctcctcttcaaaaaaaaaaaaaaaagtgatggtctgagacccataggggcttcgagtaaacgtttccgatgacatttacttacataattttgagatcataccacttgactgagttaagatttgcagaatgaatggaggagctgacggatgcataaaactgctaattcaagatcaagcagaacagaatttaatcacataggactgaatgaactgataaagaatgataatggattttgtttgaaacattaccggctcacccaggcgcagtggctcacgcctgtaatcccagcactttgggaggcgaggcaggccagtcatgaggtcaggagttcgagaccagcctgaccaacatggtgaaaccccgtctctactaaaaatacaaaaattattcaggtgtggtggcgtgcacctgtaatcccaaccactccagagactgaggcaggagaattgcttgaacccaggaggcggaggttgcagtgaactgagatcgtgccattgcactccagcctgggcaacggagcgagacaccatctcaaaacaaacaaacaaaaaactcataaaaaaagaaacattgctgactctttaatgtagtattttctgggtgtatggaactcctttctcttttctgttcagctgtctacaactcatagactaaattttgtgaacagaaataaacattttatcttctccctgcctgattccttcagaatttagaaactcttaagggcaataaaattatttgcataagttcaaaaagaatctgttctctttgcaacaggacacaattagaaatattggttatattaccaaggccttgactggaatgtcatatttgggaataatgcataaaatcagacatgaccagacaattttaaggaaataagataaactttatggagccaatgcctacaaagacttcttgaggaaaccagcctggcacctggcttatagggtttccaggcatacaggtgactaaggaaaaaccacttcacggcatccccaggaaacaggataatttggggacccggaaaaagaagaattcattcacatctatcggtattggaggtgatggcttagcttatcttcctaggcttgggtttctaggctcaagagtcttttaaaggctaattggagattctgtattacaagttacagaaaagcttgtctatgtggtcatctcttcttgctgcagtcatataaataatcagttcaaatctaataagattacttatgttgtaaacaagaataaatttactttggttattttttatcaattaactgggaggcaatgactatagaaacttcacatttccatggagactttccaaactaatgtttgcaacttttctccttccctcctgacttggcttatctgagaactagaactgcccttttccccaagccctgcaacctgaaactgcatgacctgatataagtttcaagaaaatcacacaacaactcaagtgtggacaaccttcatgcctgctgctgtgtaggccactcagaaagctccccagcacactgcacagtatctccaaagatactcaagctgcaaatggaaagaaccattggatgaccttgcttttcctcactccagcatgtaaaggtgtttcaagcccagcatttacaaatctgggctaactgccctctggactctgaagtagtagttactctcattttcctttttactcatagagattttcatcattaaatgcctaaatgcttgtatcatccagcaaatatccccctccaaatgagaaataatcttgtattgttcaaaggaaagaacaatgtctctttgttctttgaataagggggccaagggtaacaaagactatctcgttgaccaagctagagtcagcctcctctaagtcctctttttgactaggccacagctttgagctctgctcttggcccatttagtccagttttagaaagaaccctgctgaatccatttagcaaacatcctccactcttggtatctgatcactgtccatatctgaccaaatgccaaattgctgaccctcaacatgttgtcatcatggcctgccttcagcaagaatcctggtgagttttagccttgatgtgttctcttaggaatttaccatccactgatcccagctctgcttcttggctataaatctccacttgtcctcactgtattcagggttgagcttgatctctctcccctactgcaaaaccacattgcagttgtctcttctggagtaggcttccttgtcatctttaagtgtatgagtttttttcttaaaaaaaaacaatagttagggaggacaggtagcattaggagatatacctaatgctaaatgacgagttaatgggtgcaacacaccagcatggcacatgtatacatatgtaactaacctgcacattgtgcacatgtaccctaaaacttgaagtataataataataaaaaaaggttataaaaacaaaataaaatttgcatttagtgtacacagtctgattgccctgaaaactgtctttcctagtttgttctccaaccaacatgtgcaatgtgcctgggaccatgccctcttatcaagggaaaggcaggagagagctggcatgagggccattcaggatatgaaagtggctgggtgtggtgactcacgcctgtaatcccagcactttgggaggccgaggctggtagatcatgaggtcaggagttcaagaccagcctggccaagatggtgaaacctggtctctacaaaaaatacaaaaaaaaaattagtcttgcgtggtggcgggcatcccagctactcgggaggctgaggcagagaattgcttgaacccgggaggtggatgttacagtgagctgagatggcaccactgcactctagcctgggccacagagcaagactccgtctcaaaaaaaaaaaaaagaaagaaagaaagaaagaaagtgatgtgagaacaagatgttcctgatgtggacatcatgaacgactccagactggagtatcaaggctgacaaggctggaaagattcccttgctgagttttgcaagatatgcacagtaaccatatactaattttgagttgcaaaattgaagaattgtttatatatgtcctcatcttacaagaacacctgaagtagctcagttgtaagagatttagattgcaaatcaaaaggtacttggatggggcccaggttccagtaggatgatcaccttttttatatccaggtctcatttcagtcataagaagtattcacagcagagcttcccctgcaggatgctcaagtatatttgctgtggcaactgagggaaccaagcctcagtcatgttccccagagcttgcccatggcatttacatttgcaaaaagtaaatctcttgatttccttttggtttcagtagtgtgatttccttttcaaaaataatagcaagtgatactagtttacatataaatagaaactgtaaagttcctttgtttttactatttatcaatatatttaataattatatatatttatatagcctgaaataatgcaaacaactttaaagaattgacacatttgtttatattttacaggtaaaaagattaaaattttggcttatttgcctgaagtcacactgctagttaaatgacagagctaaaaaatgttaaataagttgctaaatgaatgtaattaatttggtttgtttgtttcctaaaatattgatttaaatgtctttatttaaattttaaaatgatagcatttgaaagagtataaataaaattcttaagccgcaatagtaaaggaatttagttacaatgcatgaagttagaagcaatagctttggatttgtaaatgtattcttgaagggtgtcataaagaaatattttattcctatttttcctttgttttgttggagtagttttcccccatctttaatgaggtataattgctttaccagttcgaataggtttttatagccattgtggagtctttagatttttctatgtatatgatcatgtcaactgcaaatagggagagtttttcttcttccttttagatttagatacatgctatttctttttcttctcttattgctctggatagaagttccaatactatcctgaatagaatcaatgagagtggatatccttgccttgtatgggattttagaggaaaggccttcagctttacaccattgattatgttagctgtgagtttatcacctacggcctttgttgtgtgggggatatgttcctcctatacctattttattgagagttttttttaatcaataatagaagttgaactttgtcaaatggtttttctccatctgttgagatgatcacatgtactttttccttgtttgtgtattcaccacattaattgattcacatcagctgaactactcccatatcccagagatatatttcactttgtcatgctgtatgatccttgtaatgtgcttttgaattcagtctggtcatgtctcattgaggatatgtgcatctatgttcatcagggatactggcttgtggctttattttcttgctctttttctggctttggtatcagtgtgatgccagctgcatcaaatgcatttggaagtgtcccctctacttacatgtgctggaagcatttgataaggattgttattattcttctttgaatgtttggtagaatccactcacgaagccacctggttctgggcttttcttttttgggaggtttttgtttgtttttttaaaatattattcatttttccatctttattgaggtatcattaacaaataaaaatgtatatgtttacagtatacaaagttatattttgatactcatattcatcatgaaatgatttcccccaatcaaactgagtaacatgttcttcacctcacatacttatcattctttttgggatatggtaaaaacgtttatgatttactctctcagcaaattttacacattcaatacagtaatattaactagtcaccatgctgcacctttgatctccagaacctattcatcttgcataactgaaacttggaacccttttaccaatatctccctattttcctcacctctcagtcctcggaaaccatcattctactcttggtttctgtaagttcaacttctttagattccacatatcctgcgattatgcagaatttatcttctgtgtctggcttgttttgtttagcatgccctccaggttcattcatgttgtggcaaatgatagagctttcttctttttaagcctgagtaatatcctattgagtatatacagtgcattttctttatctattcatccattgatggatggacacttagtgagggtggcatgtggataggaggcgttctgcatttctccagttagatctcagtctttattgagcctgtgtctctgaacttcacatgggtttctcaggcttctcccacgaggtcgcaaaggatagctaaggtggactggagctggacatttccctcccccaacacagagggctggagctagctgagatccagtctcactttccctacctaggtcagtgaggttctgataaaatcttagaaaacttaggttctggttaagtagttttgcctgaggacagactttgttaagcacagagcattctggtagcatgagtatttccccccagtatttactgtgagaacctggttgagctactggaggtcaaaaccacaaaacgatctcgcttccccatgactgagtgcccctggtgtttttagttctcaggccagtccacagccagcctctagcagcttcattgcagctgaagctctcctgccctagcctggctcccacagagctttctgcacttgtgtgtcttgactccctgcattcattttcctgtctctgtaattttgaaagcagcagttgccccatgaatttaattattttgtgaatctatgatgaatagttgattgttcagctttgttctttttgttaacatggtgtatcagtccattttcatactgctatgaataaatagtagtgtgggtaatttatgggtaatttattactgggtaatttatgaagaaaaagaggtttaatggactcacagttcatatgactggggaggcctcccagtcacagtggaaagccaaggaggagcaaagtcatgtcttaggtggtggcaggcaagagcctgtgcaggggaactctccctatttgccgatgacatgatcatataggtagaaaagtgatagtgagacttattcactatcacaagaacagcacaggaaaaacttgcccccatgattcaattacctcccaccaggtccctcccaagacatgtgagggttatgggagctacaattcaagatgatatttgggtggggacacagacaaaccagatcacatggaatggtgacttccaaactccttataggcagaaccccagactgcaggggtgatggcaggaggcagtgcatggttaggaagctgcacagtcatcctgttcagaggagatcaggctctggccaggtagaataggtggagggacagaagcagtcaggtgtggacatgctgtgaagctacagagaggggctctgccgatggagtggagatgaggtagagagaagacagaagtcaagaaaaacaaaacagtgggaacctgaacacctgtggggatggagctgctctcatggaagaggaggatgagggaggttgggctcaggggaggggtctagagcttgggcttggtgtgttagatgtcaacatagagatgttgtggcagtggctgtgtagctatgaatctagactaaatgaaagagtgtggaatggataaatacagaggtcatatcagtatgggtggcatgtaaagccaaggggctaggtgagaccagcaaggggatgagtttctgaagaacaaaagtgacgcaagaactcattcatgagtcaaagctaatggtaacaggtttgagagaaaaatagaatccaacaacagagaaacagaaaggatggccagtgagattggaaagaaaatagcccactgaactggaagctaagtagtggaggcatttcagggagagagggatggactgtgtcaaatgcggccagtagagaaaagtcagagggacctatttgggtgatgggagtgttctaaaatggaattgtggtgcttgtttaattctgcagattttgttttaaattaattgagttgggtgaattttaggacatgcaaataatagctcaataaagttgtttcataaaatattagcatatatcaacccagatgttctactcccagagaaaataaaagctcatattgatcaaaaggacatatgcatatatctataatatattcataataccccacatttgaaaataaacaaaatgtccatgaaatattttgtgtaatatttgtctcagtaatataaaatgtcatattaccgaaacaaacagagtgaactgcttatctacacaagaacagataagtttcaaaaacactttgagcaaagcaggcagagatcagaaagcacattgtaattgattccatgaccttgatgctgaggctcaactgggatgtgttcagagcaaccttctccaaggctgcgtgagtcagggcgagtggacactgattggaaaggaactgggggggatttctgtgttgatacacaggactcataccttgatagggttgcaggacgcagtgggggtataacattttaaaggcttattcaagctatacacttaagattggcacctttcactatattttaattgtctgttgatacacatacaataagaaacaggtaaagaagactgattactagacagtaaggagacaagcatgtttatttactaatcctccttgatggtgaccatgaaactgactagtataggctgcctgttcctggttgattccaggtggaatgctgaggtgttccccagggtttgttgtggtgcagaatccatggttgcagggatggaggggccgggatcttctgtgaaacttcgtttggggctgatatttacgaaatgtgtgaggtgatatataagatgctgcccaatggcttcagtccacaactcactttccaaagccatcaggggagacactggtctcatcagcttcttggtaggtcttttatttttgttcagacttgttgaatctgttagaagctgactttatgtaagacatgaaaagtgactcacaaaacacaggctgcagaatgtgagaaaaaaatcaattcatttagaagcttggtgttttgaaaaaggagtatgcagagatggaggcagcactagagaatgcctggctaaagaaggagtctttaaatattcccagccttgcagatgcttacaaaaaggtgaagagtgccaacttggtatcgatgaaggaattaacttctttggttcgagaagtgaaaaagaaaagttccaaatgctctaaccaacgaaggcaatggaggagctacctaaaatgctggaatccctagacaaggtcgtgggaatcagcccacagcaaggagctcttccaaggtggccaagagtgtggccctgctgctcccttccctgggagtgggcctgggtcttaagggagcgctgttccctcctctctactcaggcctcccaagcctccaggctgccttccccacctcgagtccatctggggcgggtggatccaggagcccctcctgggctggagttcctccaccttcacatgctgacatcacagccagctccttcatgttcaactcctccacatccaaggaacacggggcttcctggcgtgcaccaagaatgtgagactttcttagtcttcacagaaagtttagattctctctcaccagcagtgaaaaaatactgtatttaagatactatcttttactcagattgaaactttgtcaaactacatttttcaagacaatgttttgttaatattatttatattaatcttataagtgaataatttatattttatgatataaatattttattaaaattttaaaacagatggaatttaacaacaaagactgttagtagtcaatagtgtaaaaggaaaataaaatgttgggaccccaaactcgctatgccaaaagggaaagttaaacttggaaactgagtcacacccagaaaccatctttccttttgttcctaaacatatctttccaggttacctccctcaccctgaccatgtaaattagcaacttatcttcagggatacaggacaaaaggaaactagaaatattcctaccaccaccccaagacaaatgcatgttgatgcttcctctactctatgtttgctttatctcatgtgaggtgcagccttaccagtgccaggcgagcacataatcagctgttcctctaccccctccttttcatgggcaacctgtggcttcagtgagaactaatgaaagcctcaagacaatgagaccacttgtctcattttttctactctcccctttttgtcttctttcctttccctttggcctgctttttcccctataaatattgaaaccctcaaaactctttggaaaaagtgcaggccacagattccactgtggcttgtgtctctttttcccgggtgcatcctcaaccttggtgaaaaaaacctctaaatagattgacacctgtcccagacactctttttggtttccaatagcagtattttttccctagagttgtattcctaatgcccttaaatcatgagtaacagcaacagttttgcctaggtatgaatagtattcattgaacaaaagagaagataatagatctattttgggatggagttaaatggtacactgcaagataaatccatattatttattttttatatactcatctaataatggcaaaatatttatttaaaaaaaacaaaattgataaatgatctggagattgtattatttccctgccagaaaactgcagcgagagtttcctcactaggaagcaatgccccttgggcaatgtggggagatgtccacatcgctgccttgtccctttctcactcacctatgaaccctcctcaggggacagatgaggggagtctcagtctctcccacataataaacctgggatccccacaattagtatctgtagttacaaatgatgcccccactttagacaatgagcatgaagtgggtgttgttttagtggaagaagagcagcaagtgatcctttgattaactggtgtagtcacataagataaatgacaaagcatccaaagaaagctaatggcttcctctcaagaatgagtaaaacaaacaaacaaacaaacaaaaactatgcttgagttggagacaaagcaatgaagactagaaagccagagcatcatggggccaaaaccatggcgaggttgtgcagaggcatcttgtcaccatctccttttctgccgcccttctcaggcggtccagagggaagaggaaggtcaccaggttggcctccaggagaaacagcggcaggttgagtatgcagctgtcctttgcaaggtggtctgtctgaaagagcaatgccctcggttaaggtgaggtagaacttgtcagtgaagaggggcttgggctgctcacggaagtatctatattagacaaatctaaagagacataaagttagagattattacaggctgagaaaaggagggaatacaaagttattgatttatgggtacagagtttcttgttaggatgatgaaaatgtttgcaaatggtggtgatggttgtacaacactgtaaacataattaatggctaatgttatgtataaatttgaaatacacattggcaattttaggaagctatacaaagagatactctcaatgacactgtggataaatcaaggttttattataaaaagtgctgaagtaacaaacaggaaggcaggaaaaataaaaagagaaataaacaacaacaacaacaaagaatagagagcaatcacaaagcaaaaagtaaaatgccagacttaagccctgacaaattaagaaagaaatgggcagagttgattttaaaaaccttaacccgagtagcctcactaagtgaaactcacttcaaatataataatataggtagcttgaaaggtaaaggatacaaaaaagtatatcatgcaaatattaatcaaaagaatacaagagtggctatattaatatcagatcatgtagacatcagatcaataaaaatcattatagacagagagaaactatatataatattgtttacataacaatactatgtatatgtatgtacatatatacatatgtattatatatacatggaacacctcatctaacaacagcaaactactcattattttcaagtgcccacagaacatataccaagatatatcatatatggatcataaaacaaacttttcaaaagtttaaaagagttgaaattatactgagagtatcctccaaccacaatggaattcaacaagaagataacataaaggtaagaggaaaatctgcaaacactcagtgtggctgtttcctcatgtgaaaatgtaacatacaaatgtgactagcttaaagactttggaatgagaatattattctggcttatccagatgggccataactataatcacaggtgttcttataagatggaaagagagagaattttaaccacagaaatggagaaagccacatgatgataggcacagagactggaagggtgcagccacaagccaaggaatgtgagccatcacctgaagctggcagaaacaaggaacgtattctctctggagctgacagaaggaagcagccctgatgataccttgattttagccacataacactcagcttaaattcctggcctccagaactgagaaaaaataaatttctgttgttataagcagttaaatttgtgacaatttgttacagcagcaaaataaagctattatactgtgaatctaaacacattctaaataatccctgggtcaaagagaaagtctcaaaggaaatttgatattatattgaactgaataaaaatataatatgtcaaaaattgtgggacagagctaaagaagtgccaaagggaaaatttacagcataaaatgtacgtattagaaattctcaattcaattatctaagctcctacctcaagagtctagaaaaagaaacttaaaataaacccaattcaactaaaagaaaggaaataataatcccagcactttgggaggctgaggccggttgatcacgagctcaggagatcaagaccatcctggccaacatggtgaaaccctgtctctactaaaaatacaaaaattagccgtgcatggtggcgtgtgcctatagtcccagctactcaggaggctgaggcaggagaatcgtttgaacctgggaggcagacgttgcagtaagccgagatcgtgccactgcactccagcctaggagacagagtgagactctgtgaaaaaaaagtgaaagaagaaagaaagaaagaaggaaggaaggaaggaaaaggaaggaaggaaggaaggagggaagaaaagaaagaagaaagaaagaaagaaagaaagaaagaaagaaagaaagaaagaaagaaagaaagaaagaaagaaagacacagaaagaaggaaggaaggaaaggaaggaaggaaggaaaggaaggaagggagagagagaaagaaaggaaggaaggaagggagagagagaaagaaggaaggagagaaagaacgaaagaaagaaagaaagaaagaaagaaagaaagaaagaaagaaagaaaagcagtgagattgaaaacaaaaataatacagaaaattaatataaccaaaaactggttctttgaaaagatgaataaaatggacacatcttagcaagtctgctaatgagaaaaaagagaaaatacatcaattttcattatcaggaataaaatgggatatcactataaaccatgcagagatcaaaaggataataaataaatactgcaatcaactctgcacatacaaatttgacagcttaaatattcacaaataaaaattcacaaattcattgaaaaacataaactaacataactcaatgtaaaataaattgtttgaatatactcacaattattaagtaaattgaattcctatattaaaattatcaaaaaagcaatctccaggtccagattgtttcactgtagaatttggccaaacatttaaagaatagcaccaattctacacaatatctttcagaaaacagaagagaaggaaatactacaatttatttcatgaaaatatattaccctgatatcaaaaccagacaaagtacaaacaagaaaactacagacacataaatgtagaaacagaaacctttaagaaaatattagcaaatagtattcattgatgtataaaaacagttacacactatgaccaagtgaagtttatttcaggaatgcaaggctgcttctatgtttgaaaatcaatgtaatctacgacattaacaggctgaagaaaaaaatcaaacgattatatcagtcaattcaaaaaaatcgtttgacaaaattcagcacccattcatgaatttatgaagaaaactatctgaaaaataggaataggagaatttttaacttgataaaatcatctgtagaaaaaaaaagaaagctaaattacacctgagaatgaaaaactgaatgctttctgcaaaaattgggtgtatggcaaagatgcccacttttgtcactcttattccaatattgctagaaattctagccagtataggaaggcaaggaaaatactataaattagaaggaaagaaacagaccctagttgcagatgacatgatcgtgtgaaaattcctgaaactttcaaataataagcaaaaaaaacccctcctgaaataaatgagttcatgtgtgtgtgtgtaatgtgtgtgtgtaatgtgtgtgtgtgtgtgtgtaatacatatagttggcacttggtatctgtgggttccacatctgcagattcaatcaaccagagataataaatatttgaaataaaaactaataaaaagaacaataaaatataaaatattataaattaaaaacaatataacaactatttatataaaatttacattgtgttaagtattataaataatctagaaatgatttacagaatacaggagaatgtgtgtaggttatatgcaaatactatgccctttttagttttaatttttttaatttttaatttttatgggtacacagtaggtgtagatatttattagatacatgagatgttttgatatactcatgccatgtgaaataatcacatcatagagaatggggtatccagcccctcgaacatttatcctttgtgttacaatccaattacactcttttagttattttaaaatgtagaatcaagttatcattgactatactcaccctgttgtgctatcacatagcaggttttattcattctttctaagtattttttgtacccattaaccatacccactttcttcctgatccgccactacccttcccattctctggtaaccatccttctactttctatgtccacgagttcaattgttttaatttttagatcccacaaataagttagaacattcaaagtctgtctttctgtacctggctgatttcacttaacgtaatgatctccatttccatccatgttgttgcaaatgactggatctcattcttttttatggctgagtatactccattgtatataagtaccatattttctttatccattcatctcttggtggacacttaggttgcttccaaatcttggctattgtgaacagtgctgcaacatacatgggagtgcagacatctctttaatatactgatttcctttcttttgggtatatatctagcagtaggattgctgaatcatgtgatagttcaatttttagttttgtgagggacttccaaactgttctcatagtggttgtactgatttagatccccttcaacagtgtaagagggttcccttttttccacattctcaccagcatttactattgcttatcttttgaatataagccattttaactgggtgagacaatatctaataccatgaccttttatataaaggacttaagcatctgcagaatgtggtatttgtgggggtcctggaaccaatctcttgtggaaactgagggatgactgtattggaaataacatgcaagcattaaaaaatttttaaaagtacaatcacttagaaaataatacaatagagtaaatctaacaaaacatgtacaggacttaaatgttgaaaaccacataacactgataaaataattcaaagttctaagtaaataaaaaaccatactatgtttatgtattggaagattcaatatagtaaagatgtcatttttccctaaattgattcataggttagaggtgattccttttaaatcccagcaaggttttttttttttgtagatataaataagattatcctaaatgtatacaaaaagacaaaggaactagaatacccaaaaccatcttgaaaaaaaatgagagaaatttgtctactctatttcaagacttacctagtcaaaaaggacaaggtagagagatagacctgtagatcaatggaccagacagagagctcggaaatagaatcacataaatattctcaactgatttttacaatggatgaagattgactttcaacaaatggtgctgctattcacaatagcaaagacttggaaccaagccaaaaatccaacaatgatagactggattaagaaaatgtggcacatataccccatggaatactatgcagccataaaaaatgatgagttcatgtcctttgtagggacatggatgaagctggaaaccatcattctcagcaaactattgcaaggacaaaaaaccaaacacagcatgttctcactcataggtgggaattgaacaatgagaacacagggacacaggaagggaaacatcacacactggggcctgttatggggttggggaagtggggaaggatagcattaggagatatacctaatgttaaatgacgagttaattggtgcaggacaccaacatggcacatgtacacatatgtaaccaacctgcacgttgtgcatgtgtaccctaaaacttaaagtatatattaaaaaaaccaaatggtgctgaaataattacacattcataggcgaaaatcctttagttttagtctcatactttatatatgaattaactccaaatggatcatgtatttaaatgtagaatacaaaactatagaaaaaaaaaccttcaagatctaggactaggcaaaatattcttttgatagataccaaaagcatgatttgcaaaaagacccatttataaactggacttcaccaaagcgaaaaccttttgctctgtgaaagatcctgttaagcagatagaaaaacaagttttaaactgagatcatgtattttcaaatttatgtatgacaaaagactggcatttaaactcaacaataaaaactcagtaacaaatcaaaccaccaaattagaatatgaccaaacgcatgaagaggcatttcaaccaaagaaggtatacagaaagtatagagcacatgaaaagatgtttgacattgttatccattaagaaacacaaattaaaaccacaatgtgccataattaaatgcctatcagaataaccaaatttaaaaatatcctaataaccctattgctggtgggaacgtagtatgataaagccaccccctgatgaacagtttgggagtttctgtaaaaatttgacacatgcaactaccatacaaaccagttactgcactcctcatcattcatcctacagaagaaatgacttctgttttcacacacataaatctatgctggagtgcttttagcagctttatttgtaatagccaaagccagaaaacaacccatatgtccttcaataggtgaaagggtaaacaaagtgtggtacatctatacaatgaatactactcaacaataaacatgggtcgggcacggtggcttatacctgcaatcccaacaccagaaggcagaggcaggaggatcacttgagcccatgagtctgggaccagcctaggcaacatggcaaaatcccatctctacccccaaaatactaagaaattagccacgtgtggtggggcacacctgtagtcccagctacttgagaggctgaggtgggaggatctattgagcctgggagtttctaccactgcattccagcatgggtgacagaggagaccctgtctcaaaataattaattaaaaaaatttataacttaggaaaacataatgaatgagttatttacacaccaataacccagaggaactgctggagaattatactggtaaaaaagctaaccatcaaaagctatatgctgtacaattccatatatgtaacattctttaaaaaaataacaaaatgaagaagcaattagtgatttccagaagttaatgaaggtgtggaggtgggagggaagtgtgtgtggctagaaagagcaacatgactgattgttgtgttgatttacgattctgcatcttgtaatatcaacgctaatatcctgggagtgctgtccttctatagtttcacaaggtgttaccattggcaaaaactgggtaaatggtacacagaatttctgtattatttcttgcacagtatgtacatctacaactatctcaaaaaatgttcaatttgtaaaaagtagctgcagaatgtacatgacatccctaggtgaaggtgacctatttataatagcattacatgtataaatccctaggaatggatttagtaagaatatgaaaaaagtatatagctttattactgaataaagggaattctgtcctcgttaggatactcagtagagtaaatataagaaaatttcctgaggtaaacctaaaaattccaccacaaacccagtcataatcataatatatttctttatgaaactctagacactcaatcttaggtttcttcaaaggaataaatgcccattagtagcctgaaatactctgaggaagaaatgagaagtgaaacatggctgatagtaaaatatagtgtaaatttacagtgatcaaagagaactacatcctagtaggaagagacaagtaaatcaacacaacaaagtagtctctagcaatgcacacagggagattttgttgactgtaaaggtgatcttacaggaaaaagaggaatgaacagactatttgacaacttactgtctaagtggaaagacaataaaaggataaatgtccatcttacataaagtgttctctaaattaaaaatataatacattggcataaaatacaacatactggtaaatgatacatacaaccagtttatagaaggaaagcaaatagccgataaacataaaaagatacccaacctcaccaataattaaggaaatataactcaaaacaacattcacttgtcagattgacaaatgcttaaaatatgtaaatacttaactatccaaaatattaatatccagggttggaatagaaatgattgaaatggagggggcgtggagccaagatggcagaataggaacagctccagtctacagctcccagcgtgagcaacgcagaagatgggtgatttctgcatttccaactgaggtacccggttcatctcactggggagtgccagacagtgggtgcaggacagtgggtgcagtgcaccgtgcatgagccgaagcagggcaaggcatcacgtcacccgggaagtgcaaggggtcagggaattccctttcctagtcaaagaaaggggtgacagacggcacctggaaaatcgggtcactcccaccctaatactgtgcttttccaatgggcttatcaaacggcacgtcaggagattatatcctgcacctggctccgagggtcctacgtccatggagcctcgctcattgctagcacagcaccctgagatcaaactgcaaggcagcagcgaggctgggggagggccccccgccattgctcaggcttgagtaggtaaacaaagctgctgggaagctcgaactgggtggagcccatcacagctcaaggaggcctgtctgcttctgtggctccacctctgggggcagggcacagtcaaacaaaagacaacaataacctctgcagacttaaatgtccctgtctgacagctttgaagaaaatagtggttctcccagcatgcagctggagatctgagaacaggcagactgcctcctcaagtgggtccctgacccccgagtagcctaactgggaggcactccccagtaggggtggactgacacctcacacggccgggtactcctatgagacaaaacttccagaggaacgatcaggcagcagcatttgcagttcaccaatatctgctgttctgcagcctccaactgctgatacccaggcaaacagggtctggaggggacctccagtaaactccaacagacctgcagctgagggtcctgactgttagaaggaaaactaacaaacacaaaggacatccacaccaaaaaccatctgtacgtcaccatcatcaaagaccaaaggtagataaaaccacaaagatggggaaaaaacagagcagaaaaactggaaactctaaaaatcagagtgcctctcctcctccaaaggaacacagctcctcaccagcaatgcaacaaagctggacggagaatgactttgacgagttgagagaggaaggcttcagaagatcaaactattccgagctaaaggaggaagttcgaaccaatcgcaaagaagttaaaaattttcaaaaaattagatgaatggctaaatagaataaccaatgcagagaagtccttaaagaacctgatggagctgaaaaccatggcacgagaactgtgtgacgaatgcacaagcctcagtaaccaatgcgattgactggaagaaagggtataagggatggaagacaaaatgaatgaaatgaagcatgaagagaagtttagacaaaaaagaataaaaagaaatgaacaaatcctccgagaaatatgggactatgtgaaaagaccacatctacatctaattggtgtacctgaaaatgacggggagaatggaaccaagttggaaaacactctgcaggatattatccaggagaacttccccaatctagcaaggcaggccaacattcaaattcaggaaatacagagaacaccacaaagatactcctggagaagagcaactccaagacacatatttgtcagatttaccaaagttgaaatgaaggaaaaaatgttaagggcagccagagagaaaagtcgggttacccacaaagggaagcccatcagactaacagctgatctctcggcagaaactctacaagccagaagagagtgggggccaatattcaacattcttaaagaaaagaattttcaacccagaatttcatatccagccaaactaagcttcataagtgaaggagaaataaaatactttacagacaagcaaatgcagagagattttgtcaccaccaggcctgccctaaaagagctcttgaaggaagcactaaacatggaaaggaaaaaccggtaccagccactgcaaaaacatgccaaattgtaaagaccatcaaggctaggaagaaactgcatcaactaatgagcaaaatatccaactaacattataatgacaggatcaaattcatacataacaatactaaccttaaatgtaaatgggctaaatgctccaattaaaagacacagactggcaaattggataaagagtcaagaaccctcagtgtgctgtattcaggaaaaccatctcacctgcagagacacagataggctcaaaataaagggatggaggaagttctaccaaggaaatggaaaacaaaaaaaggaaggggttgcaatcctagtctcggataaaacagactttaaaccaacaaagatcaaaagagacaaagaaggccattacataatggtaaagggatcaattcaacaagaagaactaactatcctaaatatatatgcacccaatacaggagcacccagattcataaagcaagtccttagtgacctacaaagagacttagactcccacacaataataatgggagactttaacaccccactgtcaacattagacagatcaacgagacagaaagttaacaaggatacccaggaattgaactcagctctgcaccaagcagacctaatagacatctacagaactctccaccccaaatcaacaaaatatacattcttttcagcaccacacctattccaaattgaacacatagttggaagtaaagcactcctcagcaaatgtaaaagaacagaaattataacaaattgtctctcagaccacagtgcaatcaaactagaactcaggattaagaaacttactcaaaaccactcaaccgcatggaaactgaacaacctgctcctgaatgactactgggtacataacaaaatgaaggcagaaataaagatgttctttgaaaccaatgagaacaaagacacaacataccagaatctctgggacacattcaaagcagaatgtagagggaaatttatagcactaaatgcccacaagagaaagcaggaaagatctaaaattgacaccctgacatcacaattaaaagaactagagaagcaagagcaaacacattcaaaagctaccagaaggcaagaaataactaaaatcagagcagaactgaaggaaatagagacacaaaaaacccttcaaaaaatcaatgaatccacatgctggttttttgaaaagatcaacaaaattgatagactgctagagagattaataaagaaaaaaagagagaagaatcaaatagatgcaataaaaaatgacaaaggggatatcaccaccgatcccacagaaatacaaactaccatcagagaatactataaacacctctacgcaaataaactagaaaatgtagaagaaattgataaattcctcgacacatacactctcccaagactaaaccaggaagaagtagaatctctgaatagaccaataacaggctctgaaattgaggcaataatagctttccaaccaaaaaaagtgcaggaccagatggattcacagccaaattctaccaggggtacaaggaggagctggtgccattgcttctgaaactattccaatcaatagaaagagggaatcctccctaactcattttatgatgccagcatcatcctgataccaaagcctggcagagacacaaccaaaaaagagaattttagaccaatatccttgatgaacattaatgcaaatatcctcaataaaatactggcaaaccgaatccagcagcacatcaaaaagcatatccaccatgatcaagtgggcttcatccctgggatgcaaggctggttcaacatgtgcaaatcaataaacataatccagcatataaacagaaccaaagacaaaaaccacatgattatctctatagatgcagaaaagggctttgacaaaattcaacaactcttcatgctaaaaactctcaataaattaggtattgatgggacatatctcaaaataataagagctatctatgacaaacccacagccaatatcatactgaatggacaaaaactggaagcattccctttgaaaactggcacaagacagggatgccctctctcaccactcttattcaccatagtgttggaagttctggccagggcaatcaggcagtagaaggaaataaacggcattcaattaggaaacgaggaagtcaaattgtccctgtttgcagatgacatgattgtatatctagaaaactccatcgtctcagcccaaaatctccttaagctgataagcaacttcagcaaagtctcaggatacaaaatcaatgtgcaaaaatcacgggcattcttacacaccaataatagacaaacagagagccaaatcatgagtgaactcccattcacaattgctttaaagagaataaaatacctaggaatccaacttacaagggacgtgaaggacttcttcaaggagaactacaaaccactgctcaatgaaataaaagaggatacaaacaaatggaagaacattccacgctcatgggtaggaagaatcaatattgtgaaaatggccatactgcccaaggtaatttacagattcaataccaaacccatcaagctaccaatgactttcttcacagaattggaaaaaactactttaaagttcacatggaaccaaaaaaagagcccacattgccaagtcaatcttaagccaaaagaacaaagctggaggcatcacactacctgtcttcaaactatactaccaggctccagtaaccaaaacagcacggtactggtaccaaaacagagatatagaccaatggaacagaacagagccctcagaaataatgccgcttatctacaactatctgatctttgacaaacctgatagaaacaaggaatggggaaaggattccctatttaataaatggtgctgggaaaactggctagccatatgtagaaagctgaaactggatcccttccttacaccttatacaaaaattaattcaagatggattaaagacttaaacgttagacctaaaactataaaaaccctagaagaaaacctaggcaataccattcaggacataggcatgggcaaggacttcatgtctaaaacaccaaaagcaatggcaacaaaaaccaaaattgacaaatggggtctaattaaactaaagagcttctgcacagcaaaagaaaccaccatcagagtgaacaggcaacctacacaatgggagaaaatttttgcaacctactcatctgacaaatggctaatatccagaatctacaatgagctcaaacaaatttacaagaaaaaaacaaacaaccccaccaacaaatggttgaaggatatgaacagacacttctcaaaagaagacatttatgcagctatacagacacatacacacgtatgtttattgcggcactattcacaatagcaaagacttggaacaaggccaaatgtccaacaatgatagactgggttaagaaaatgtggcacatgtacaccatggaatactatgcagccataaaaaataatgagttcatgtcctttgtagggacatggatgaagctggaaaccatcattctcagcaaactattgcaaggacaaaaaaccaaacacagcatgttctcacttataggtgggaattgaacaatgagaacacatggacacaggaaggggaacatcaaacaccggggactgttgtggggtgggggaggggggagggatagcattaggtgatatacgtaatgctaaatgacgagttaatgggtgcagcacaccaacatggcacatgtatacatatgtaacaaccctgcacattgtgcacatgtaccctaaaacttaaagtataataataataaaaaataaaaaaataaaaaataaataaataatcaaggcttttacagaaaaaaaaaagaaatgattgaaatgattattgccagaagcacttggtgggaatatgaatgggaactgcttttttttttttttttaggataatttagttgtgagataggaatagaactgggttgttgcaggaaaatggaaaaacccaaacaatagctgaaacaagaactaggcacaaaaacccacaggataacagaaaacccaaaataagggagagaaaatgtctaaagccccagtgagggtgacatgtccatgacccttccaggcaaacccaaataagggaaaataggggtcagtaactggggagtccatgaaacccctccttttccataatatttcatgattatttcactctcaaattaaagaaacaggcataagataggaatgctgggtgatcacaggagaagcaggaaaatatcaagaaacaattttacataatgtcaagaaaagagctgttaaaattagctataaggacaaagatgagcctggcctgataagatcctcacagataaaatggggccacactggctgaaacagtctaggtccaacatggcattggatttgacccatgccctactccagacctaattatatgcctattccaaaactaagtcacacacccaccacaccatggtagatctgagcatggccatatttcttataaaaatgggtggccctcaagcctaagaaatctccacctttttcctagaaaatctactcttttcctagcaaatctattctattctacttcctaattagaagacaccataacattagatacccagactctcctgtgcacaattcactctcccaagtatacctgcactccaactctcaagtgcatactttccctttgcaataaaagctttttgcttttcccttcattctgactcatccttgaattttttcttgcaacaatgtctacaacctggaacactggctgtggctgggagacctacctaggtcctcctgcaacacttgaatctattcaaaatccaaaatgtgcctaccccttaactcatcaattctccttccagggtatagctgtagaatacactcacacatgttcacagaatgacagacaggaagatgatcattgaatttaacttttgtctgcaatagcaaaaagaagtagaaggaggaggaggaggagaaataggaaacaaaacataatgtcctttaattattatacattatacattcatgccatagaataccagtcaatcattaaaacaaatggcataaatacatgttttggcatgaaaatatttgatatataattatatgcaaaaaatgttttacagaatgatacatgtagtatgaatacaattgttttaaaaacccagtcacaaactaccagaaatatatttgtacaaatttctatatatttagatgtaaatgcacagagaatggactggaattatggacttgttggcatgtgttacatacaaagagggaggtgggtgtaggagtggtaaagagacctattcacatctgtccacttatatttttattgtttgaatatagtatctcccaaaaaaccttatgtattacatgtgcaattgtagaaatcaataaattttaaaacaaatctaaaccaacaagaagtcgcagggcataaaagtctatgggttgcccaaaaagaaccacatatagccaggacccctaatcatgtctatttttaacttctgcatatgatcttcaagataacaggatgtcaaggctggaggggcctgaaagatctcaacagctcagcaaggggatctttcgggatgagtcacaagacatgggtttggggtcgaggcagagagcagaggataggatacagatgggtactccagagccgatcgacatttcaactcacctctaattttacctgtgcctcaaaatgactctgccaccttcagtattcttaaaccttcctaatgtaatattgaagaacccttccaaatgctgtttacttccaaataactcttccatacacccatggtatagcctctctacctgtatcttgaatgttcttttccctggtcacagagaactttacggcctccctagcaaccacatagtagatatacttggagacaggcttctgatttctacagacttcagactcttagaaacaataaaagctcctttcaaatttatttcttccattgttaaaaaatttaaaaagcaaacaaataaagcagagccttctctggatcccatcccagtttttgctcctcctccccgccttccaattctattactttatcttcttttccagaccaagccactaggggaaaaaaataataattctctacttctctctacccattcactgttttttttttctttttccccaggcagacaactgaattaggggatttattctacccaggctatactcagctacaaatgataggagaacccacctagaatggagcagatgcaaggcacacaggtgatgattttagttcattgcaaggtgggtgttctgtcagatgtgctctggacaataaaggatctgataatggaggtgaagtatcaggtgtgttggttgagtgagcaaattcccagctagcagcacagtccccagcacttgagtccacattccggctgctgtggcctcaatgcactgctcaaggtctgtttccttgaacccctgccttgcctttctcctcttgtcattcatttagcttacttttcccttcctctgattgaccctcatggcaaggaggtattagccagagtggaattagggctgggggacacctttttgtctttaattcctgcaaacctcactggcccactcatttgaactgatccgttttctccaactgcaaaattgaaaacatttactaaaaacatcttccttaaatattgtgaattccttactattgatcacactgtcttcctttctcttccctcatctctgacctttttttcttataaaagtggtcccttaaaagccaaagtttcatgtttctgtcctagaggtccctagatctttgtcttcctcattaaatgattaattcaacacaatattagtcatccaggaggcactcattcaatgtctgttgaataagtgaataaacatatgataattgcctacactgataagggtctgaccacaaagggaaaaaccagcttttgtctttgggtggccatccaaaaatccatggcatcaatgcatggatttgggagagggcatattggaggatacaagaaagaagtataattttcatgatattgtcctagccctcaagtcaccagaaaactaatatgtttaagaaaatgtgaaccagtgccactttgtgcagtgctaagtagaaatggactgaagtccagaaatgagaaagcagactatatggggccaagtccccttagggcttcatgtagaagcaactggaaagatgcagaagatccagacaggaagaaagagcaacatcccttcctaaaggaaagagtgagtgaagaaatcctcaagttccttgttagtctgtgggctaaaaacaccaatgaacttgaaaaacacaattagcattaatatgtgattttcaaatataatttccatgttcaactttcaacttcaaatataattttacttgtacctccacataaaacagaagctatacatgagtgggaggtcatttagtgggtgttggaaacagaatgaggaggacagaggacttcttagacctagcagggggaccatgagaccatctcatctcaaaagaccaggagatccaagcactcatagaatctaggcactggaagagcctaatgcatatccagcccatggtcccaccaatatccttgacagattgtggggtcgttcaacctcactcagaacatgaccaataatgggggagtgactggagcaaaaaaaaaaaagaaaagaaaagaaaacttcgggccaatatccttgatgaacattgatgcaaaaattttcaacaaaatactagcaaatttaatccagcagcacatcaaaaagcttattcaccatgataaagtagcctctatctctgggatgaaaggttggttcaacatacacaattcaataaattagattcatcacgtaaacagaactaaagacaaaaaacattattatctcaatagatgcagaaaagagttttgataaaatttaacatccattcatgtttttaataaaataccctcaattaactggctattgagggaacatacctcaaaatagtaagagctatctatgacaaacccacagccaatttcataccgaatgggcaagtgttggacacattcccctttgaaaaccaacacaaagcaaggatgctttctctcaccactcttatttaacataccattcgaagtccttgccagggcaataaggcaaaagaaaaaaataaatggcatccaaataggaagagaggaagtcaaaccatccctgtttgcagacaacatgatcctatatccagaaaaacccatagtctcagcctaaaagctttttaaactgataaacaacttcagcaaaacctcaggatacaaaatcagtgtgcaaaaatcactcacattcctatacaccaacaacagtcaagccaagagccaaatcaagaacaaactcacaatcacaactgccaaaaaaagaacaaaatacctaatgtatagctaagtagggaggtgaaacatctctgcaaggagaactacaaacaacggctcagagatatcagaggcgacacaaatggaaaaccttttcatgctcatagatagaatcaatgtcattaaattatcattaaataataatgattaaaacctgaatggtaaaaaaattatcattaaaataaacttctctctgactttcttaccataaaaactggccataaagaatgatctggcctacctttttggactgtagatcagaaaaccctcattccagagagtatcctgccctatacccagaaggaagaaatgctgctcagagaggccaaaaaggatctagaaagacgggcttttccgggtttccccactatgtctagtagcattagatcacatgctttctgtccaatcatatttctacatggctttcctactgtgtcggacctaagcacaacagtagacaattttctttgtatctttgtgtcttcattctgaaggtctcaatgtgcacacattgaataaatttgtatgcctgttctctaattaatctgccctttgtgagctgatttttcagggaaccttcagagggcaaaggggaacctatattctctggttccctataaaagaagaagaagaagagaatcttggaaaggtaagacaagagcagccaaagccaggcagaataatgtaagaaaacccagaaggagaaaatgccagatgctgaactaaggccaggttgcaagtttgccactagaatgggcaggagaagaatcctaaggaccccttgggttatggcagaaggaggaaataggagatgccaagaagggggtgacctccatccattccaggagcctaaatattgaatgcaagcatggaggaagcctgagtccagaaagaaaagcaggagagggccggatctgcctggagctcagaaaaggattcctggggatggtgccactgcagacaggtctcatggactggggggttgcagcttttactaataaaatttttaattgggggaaacaaaaggaaacttgagagaaggtgcacatcttcccttcttcctgcacataagtgactacccatgcctggctaagagcttgcaagcttaatcaagatacaataaccaatggtcattattgggtggggaaatgaaggtgcttgtggttatgaacagctccataagcatgaatccaggaaagagtggctctaagggatttgggctatagccttattatcagagccattcttctcatctttaaaataacctggcagggccttccaatgatcacattgtggcaatggtaattcagctttgtcacctctgctgtgatgacctgtcagttggttcatatgagctccaggagcatctagggagcccagaaggtgctgagccatccaaggaagatgaggttcaggtggaaaggtcaatggtgacatttcatttcaagagatctgaaagggatcacttccctttgacaaatgtctttgtatctccccgtgggctagaagaaccatgattcatacaagatctgagtctatggaagtagaggagttcagtgaagaggggagatggagctttataagttcagtctaaacattatcaaagagggggatacaaaaatctcaactgtgcaggaatcaaagactagagtacacacccagcagcaaggaaagccctggagtcacatggaccacctacagaatggggccacaagtgataggcaaatggcgaaagtcagtcatgctaggtcttgaagggcccattgacctcaggaattcagaagacgctcagccctgcctgtgtgatggagcactgtgatgaagaagtgggctgggagacaggccatctgcatggtagaactggctgctctgcatgagctgtgccagtggaaagtcacatggcttctctatgcttccatgtcttcctctgcatgacaagaataagaatatgggcagcttttaagggctgtaggaagtattcaataatataacgtgtgtaatgtgcctggcaggcagtaactatttagtcaaaattgggttttattacttcttactctatatatagcaatctgaggagcatggagaagttttatatgttcatttatccttctttggagcaaattagtgaagctggctcctctgcaccccacagtccttcccctgtcagtggcctgctgacttcccttgcgcttctttgtctttctgtgcctgaggaccttcctgggaaccatgtgtacagcagcctggaagtgctggaaattgccactatctgggaaagctgtcaaacaatgatgattccctttcaggggataattctgaggcaagtgctgttcatatttagtgactaaatatggctccactaggcttggaaatgtgtggtcaaactggtgtccctatttaacatgttgaggcacttggatagctcttgctcatggaagcctgaagcccattgacaggagctttggccctaatgtaggcatcttctcccacccttcctgctctctgcagcaggcatggatggctagatacctgctgtagtcttttctcacactgcactcaacatacctgtgaggccagtcactcagcaaagatgagctgagtataatggtgtttgcattcagcctggacctgatggcaatatttccatactctagtagagtttattagtgatgattgcagttattagcaatgattagtatgtcgttggtactatcagaggcttcttcgggtcacattgatctatcagtgctagacacatggtttcagcagctattggctgaggggaaatgtttagtggccaggaaaaggggcaaactggacttgtgttatatcttctattagctgtgtggcactgctcataccatctctgaacctgtttccctaaaccgcttatctcttatctggttataaatcaaaatagaaattttaacagacttcctaagctgtgtagggcagtattcataagcagatattttattattgttatgcctctgacaaagcccagtgtattctttttgaggttataaaataaaattcctacagcatttaagcaataagtaaaattgaacagatttaaaaaataaaactggtggagtttacaataaaatttgtataaaaattatataaaattatataaaataaaaattataaaattataataaaattatattattagtttaataaaactaacaatattaagcaggtaatataaataagtacacttgaacagatttaagaaaataaaactggtggagataataaaaacttaagggtgtatgccctgcctgaagacattcaaatttaaacaaataataatactgtgctattcaaacaaagtatgatttcaggccaaataatgccagtgtgtgattttttatgagttcctccaacatgctcaaaaaactacttttcaagatacaaatcccattctatcccagaatcagaagaccaaaaattttggatagattaatgaatgaagtcatcagctaaaggctgatctttttctcagacctgaaggcctgagttttattccctgcagcaaccaattgagccatcatagctccgtagctgcacatgatataggagagttgcctctttggtaaaaatttatctccaaaaagcaggggactaccattcctgttaaagtcccacagttgtctctatgccaagcatctataatttcttcaattattcaactgccctccctggaaatgttgacagcaccactttcacctgcatttctttagggaatcacagatcttacttaaatgtcctggtaactaacttttttttcacaacaccacttcactaagctaaaaaaggacattgccttcctctctttagaactcaagctgaagctcctcattgacaacctacttttgagagtcctaattgaactatgatctcaatactctctccctgccttcaggctattcactaacaacacctctttatccacacctgactgatgcctggactctctgagcctctgtcaggtcactgtatttagttagttgtaatacaaagaaagcactctccctaaattttctgtcatgtggatttcccccactgcatcatggataaaaatccttaggagtgtatataagaagggcgacatgctcagcagttaagaagggctaagtgccttgtagaggacttacatgatcaggtgaagatggtggggaacatgatctcttttccagcctttcagacatgaaataaatgtagactgtcttgctctatcatctagctcttcaagaaaagcagaaaatccaaaattttaaatctggggaacaaaaatatgcattcaaaaatacacaacaaaaaatgcaagagtatttttaaattttgcctaatagaggaaaaccaaaattttacagaaaatatctacaacaaactgggtggccaggtatccccatcaacccgaaaatttggacagatgggttaaacttcagacaaaacctcatggcatcaccatcttcttggaagaaggtgggagaaatgcagcagcttctgatggtcctgggagcatggaatcaatgccaccagcaggtgctcacaggatgcgcgtcaggtcagcctgaagcagcttctgaaaatgtgagcacgctcttcaggctccaatgtataaggatggctccactagaaggagaaacttttttgaatgtatccatttgatttgctttcattgtttacaaaaacattattctacttcatattctcttctataataactttgttttattttttattttattattattatactttaagttttagggtactttgtatgtgatttgactgcagttattgtgtcttgcttatttttaactgaaaaaaattttacttgaattttgagaaaaatggaaagggccaggagaaaattgctaattttatagctttaaagctacctcctcagttctttgcatgaaatctgtgtcttctgcttcaatttgatctggaccttattcaactcatagtgaaagaatatatcatgtaccttagaatattaacccaggacttttgactgaaaaacaaattttggtaaaacaatttaatttaaaaagtaaagaaaaaattattagagcttctggataaaatgatcaagtcacacataaaacaaagaaattcaggatttgggtgtctcaggttgggtttccctggaacagacactgaggcaggatttgtgtgtagagagtttattgaggggtaacctcagggtaaatacctatggggaactaaagaaactagggagaggagttgaactgtacctcagccacaaggatctcagctaatctcacatgtccttctagagctgagatggcccttcagagcatcccaccttgaaacgaggggacaggctttttatccccacttctaaattagcgagtcattgggcgaggactgtcaaaaaggaggagacatgtcctcggatgaaatgcctcttttcctcagaggacacgtcccagacaggaactcacctgagcgtggtcagctgccaaaactcccctagcacgtgtgactgcatggtcctgaggggacctgggggtgcacgaaaccattcaccacagattgcgtttaaactttttaaagcaatgacttatgccagaataaaatcaggaaatacattagaagtactaaggaaagaaagtgtgggccatagtaataactaaaattaaaaatggggggtcaactatggctattataaagcctgaatagtgtaaaatgcctgcagagatacattaaccgttctaaatataaaatgtgccaaaaaagagggcaaaatactcaaaatctagcagcctaaaacagcaagcctttcctgtctctcaacatgtgtggggcggaaatctgggtcatcattaacttggtgcctcctgctcagagtctcccgtctggcagcagagtgctgggtaggcgggcacttcagcctccactgaaatttacctccatgctgagggaaggcttcaggctttttggctaatgacatcacattcctgatcagtggacctctccacagagcaactcacaacaagcaatggcttccttcagagaaactgtcagaaagaccacccaagaagacagcacagcctctttgtaacctgatctccaaactgtcatcccatcctttttgccttattctattatttcaaagtgaatcctaattctggcccacactcaaggagagattacacaagggtgtgattatcaggaggtggggatcattaagcagtatcttagaggctgcctgccacaacttgtgaaatatagtgccccatacacatgtaccattattatgtgtcaatcataaattttaaaaatacagttttttaaaaatttaaaaatttaaacattattctgctttttaaaaatagaactgtacttcagattagcctaatatgactatattaagaattaatataggccgggtgaggtggctcacgcttataatcccagcactttgggaggccaaggcgggcggatcatgaggtcaggagatcgagaccatcctggctaacacagttaaaccccgtctctactaaaaatacaaaaaattcgccgggcgcggtggcaggcgcctgtagtcccagctactctactcgggaggctgaggcaggagaatagcatgaacccgggaggcggagcttgcagtgagcagagatagcaccactgcagtctggcctgggcgaaagagcgagactctgtctcaaaaaaaaaaaaaaaaagaattaatataaataaatacaataaaaatataaatataatatattaatataatatataaatataattaaaatattccccatatttcagccaataataaattaaagaatctagacaatgaccatcaacgatgcctaacatcataacaaagatagtttgacctgaggtgcttactgaggcagatgcacagcttgacctattttgcagtcttcccccaaaatcatcaaacctaaatctaatcaagattctagatctaactacttatttacaagaagtacagaagaaacaacactataagtaagcaattagcatacttcagaatgtgggaaactacggtaactactgatttcttcaacaaaagaatttcaaggcaaaataaaagagaaagagatggagaacttatgaaaagagacatcaaaagagtcaagaaaaacatcaaccagttgcaacatacggactttacttatattgtaattcaaacaaacaggtacagttataaaacaatcaggaaactgtgaacactaacatgtaatggtacaaaaaattattgggatttttaaagtataaaataatattgtgattacaggttttaagaaatttcttatcttttagagatacgtttttagttacagataaaatcgtatgatatttgggatttgcttcaaaaataatctgggtgtaggtcagttggtgggggtatagatggtcatgagttgaacacttttgaggctaggacatgggacataaaagtttatttcaatcaaacaaagtcattgtaccgggaagaataatacctgtgtaccaaatgtggtcagttgaatatagttttgtgatctttggtctatacacataaaatggcttaaaaagttaattaacctgtaccactcaattcattaaacatttagtgtgtgtaaatccttgttaagtttgcatgaattgaatttttatttgagacagggtctgtctttgttgcacaggctgaagtgtagtggctaaatcatggcttactgcagccttgacctcctaagctactactgccgctggcactttcttgcaagtgccaccttctgactggagaccaacgaacactgtccattacaacatctccaggcagaataacacggtgtccaggaaggagaaaacatgggcatgacctcagctatcaccattgcctgcaccatcctggctaaccaggaggtccctagtatatccatgagatctgttcattactaccacaactggcatttgagaaagccaatatacagaggctatctataaccaaggaatctcacagagtctatgtcactcccctgccaaccccatcagggctggtgctggttcccactactgggagacttaaggataggttacatcactggatcccttgaagacattccacagcaccagcctggagtgtggcagcgacacaaggcagctagactcagaggagcaacaacatgtgcagtaacctggctctgagagactccgactcctaggggaagagggagtgaaccacatgaaaggaaccctccataggacaaaggaactggacagcaggacttgagtctcagatcattccactggtgggaagtgtctttcagcagaaggtcagttgtagtgcgaggctcagcagggaaagtctgcagctctctccagctgccaggcagttctggtgctcatgaaggagcttggagaagaaggctttttcccccgcatccaccactgcagacaccgctggggcttttcccattggaaggcggtgtgggtgcacctatagacagcctctctggaacacttcagagcgactgcatccccccaggaaaagcaccatccacgtgcgggcctgcacaaggggtagagtcacaatttctttctacttggaacatcaccactcccacagatataaagaggcacctgtctgatctgaatagctggaacactggttatggagtgtgtctgggaggtgaatagcattcctgccagcctgggagaagagctgaggtagctctggtccttccctctgataagacctccgtgtgtttcactgaaagctcccccatccactctgtaaaagctgagacctctgcccatgaaagggtactgcatctgcccacctgctttagccatagacaatttctacctgtggatgcctcctctattagcccgaagcctaaattattcaacccagtaaataaaatactagggaaattagaaaaataaataagcgcacaccacagaagagtgaaataagcttcaagagacctctgccactccaatcccataggagagaatgaacttgctcacgcaccaagcacattgctactacaataagcatccaagaaaggcatcatacaaagactgtctgtaaccaaggaactcttacagagtcttcacctctgaaagcactaagagccaaattagtttgcaataaactgtaaatgttaaagtcatatccttaaaggggaaaaaattaaaaaaaaacagtcaaataaagaataaatgctagaataattataaaaaatagtctatccaaatgacaaggaaccagaaaaataaatctggcaatatgacaaatcagggttctataacaccccaaaagatcacctcagccctctagcaatggatgcaaaaaaagttgaaatatttgaaatacgagataaagaattcaaaaggttgattattaagctactcaaggagataccagagaaagatgaaaaccaacaaaaagaaatttaaaaaaaaaactattcaggatataaatgaaaaattgtctaaagagatcgatattttaaagaaaaaccaatcagaacttctagaaatgaatggcacatttagagaattacagaatgcagtgaaaagttttaacaatagactagaacaagcacaagaaagaatttcagagcttgaagacaagacttttgaattaaacaaatcagataaaaatatagaaaaaagaatcaaaaatataaatcaacaaagtctccatgaaatatgagattatctaaaatagccaaagctaagaataattaatgttcctgagagagaaaagagagcaaaaactttgaaaaatgtatttgagggaataatagaggaaaacttccctggccttggtagagatttagatatccaaatataagaagctcaaagaattcatgggagatccattgcaaaaaagataatcacaaaggcatatagccatcaggctatctaacatcaacatgaaaagaagaattgtaagagcagtgagacaaaagcatcaggtaacctataaagaaaaacccatccaactaacagaagacttatcagcagtaaccctacaagccagaagggatgggggtaatgttttagcctcctaaaacagaataactctcagctaataattttctatgcagcaaaactaagtttcataaatgaaagagaaatagtgtcattttcagacaaatactgaggaaatttgttactatcaaaccaaccctacaaaaaaatggtaaaaggagctttaaatcttaaataaaaagcttgatgtgcacaaaaataaaaccttttgaaagcataaaactcacatggcctacaaaacaataaaccaatgaaataaacaacagcaaagtattcaggtaacaactaacatgatgactgtaacagtacctcgcatcttgatattgttaaatataaatggactaaatgctctacttaaaatacacagattggcagaacagacaaatatcacaaataaaatatttgctatcttcaagagactcacctaccacatcaggattcatataaactcaaggtaaaggggtagaaaaagacattccacataaatagaaaccagaagtgagactaaagcaacaagaatagaaaaataaaaagatggtcattatttaatgataaaagaatcaatccaacaagcggatattacaattctaaatttatatgcacctaacactgaagctctcagatgcataaaacaattactactagacctaggaaattaaatagacaacaacacaataacagtgggagatttcaacactccagtgacagcactagtagattatcaggacacaaaatcaacaaaggaagaatgaacttaaactgcattctagaacaaatgggtctaacagatatttacgcaacattctaactccagaatagaacaagaactccagaatatacattcatcttatcagcacatggaacattcaccaagatagaccatatgacaggtcaaaaaacaagtctcagtaaatctgaaaacatcaaaatcatgtcaagtattttctcagacctcagtggaataaaactagaaatcaactccaaaaggaatcctcaaactatacaaaaaaatagaaattaaacaatctgctcctgtgtaattttggagttaacaatgaaatcaagagggaaatttaaaaattatttgaaattaatgataatagtgacacaatttagcaaaacttctggaatataacaaaagagtgttaggaggacagtttataccactaaatgtttacatcagaaagtctgaaagatcacgcacagattgacaacctaatgtcacacctcaaggcattagagaaacaagaacaaactgaataaaaagctagaggaagaaagtaaacaacaaagatcacggcacaactaaatgaaattgaaacaaaaaatacaaaagtttgatttaaaaaaaagctggttctttgaaaagataaaccaaactgacagaacattagcttgattaaccaagaagagagaagattcaaataagctcaaatagaaatgaaactggagatactgcaactgacaccacagaaatacaaaagattattcaagatcctatgaactgatctatgcacacaaactagaaaatttagaggaaatggatgaatttctgaaaacatacaaccctcatatattaaatagggaatacaaaccttgaaaagattaataagaagcaatgagattgaatcggtagttttaaaaagccaacgacaacaaaagcccagggccagatggattcacagctgaattctaccaaacatattggtaccaatcttactaaaaatattccaaaagaagaataggggaaatactccctaagtcattttgtgaagcaagtatcaccctgatactaaaaacaggaaaagatataaccaagagaaaaccccacagaccaatatccttaatgaacatagatgcaaaaatcttcaacaaaatactagctaaccaaatccaatagcacgtcaaaaaaataatataccatgaacaagtgagttttattccagggatgcagggattgtttaacatatgcaagtcagcaaatgtgatacatcacataaacagaattaaaaacaaaagccatatgatcatctcaatagatgcagaaaaatcattctataaacttcagcatcttttctgataaaaccttcaacaaactaggcatagaagggacttacctcaaatgaatcaaagccatctatgacaaacccacagccaacatcatagtgaatggagaaaagttgaaagctttccccctgagtactggaacaagacaaggatgcccactttcaccacttctgttcaacatagtaatggaagtcctagccagagcaatcaggaaagagaagaaaatatagggtttccaaataagaaaaaaggaagtcaaactactactgtttaccaatggtataattgtatacctagaaaaccctaaagactcctagatttgataaaggagttcagtaaagtctcaggttacaaaatcaatttacacaaatcagtagcactgctgtacatcaaaaacaaccaagttgagaagaactgaacccctttcacagcagctgcaaagaaataaaacacctagtaatatacttaaccaaggaggtgaaagagctctacaagcaaaactataaaacactgctgaagaaaacacagttgaaataaataaatgaaaacacattccatgctcattgattgaaaaagtaaatatcattaaaatgaccatactgtccaaagcaatctacagatttaatgcaattttcatcaaaatacatcatttttcacaaaactagaagaaacaattctaaaatttattcggtaccaaaacagagccccagtagccaaggcaatcctaagtaagaaaagcaaaagtagaggcatcaaattgccagtgttcatattttaccacaaggctgtaattaccaaaacaacatggtactggtatgaaagtagacacagagaccaatggaacacaatagaaaatccagaaatgaagccaaatgcctacaaccaactgatttttgaaaagcatacaaaaacataaattagggaaagaacaccctatttaataaattgtgctaggaaaactggctagccacatgtagaattaaattggatctctatctctcaccttgtgcaaaaatcaactcaaaacgtgtcaagtacttaaatataagaccccaaagcataaaaattctagaagataaccttgaaaaaactctcctggacattggcctaggcaaagaatttatgactaaaacctcaaaagcaaatgcaacagaaacaaaagtaaataaatggcacctgactaaattaaaaaggttctgcacagaaaaagagataatcatcagagtaaagagacaacccagaaaggaagaaaatatttgcaacctgtgcatctgacaaaggactgataaccagaatatacaaaaaaagaaaaaaaacatctcaaatcttcaaggaaaaaaataattccatcaaaaaattggcaaataatatgaatagacatttctcaaaacaagatatacaaatagccaacaaacacgagaaaatgctcagcatcactaatcatcagggaaatgcaaattaaaaccacaatggagcaccaccttgctcctgcaagaatgactattattaaaaagtcaaaaaaaaatagatgttggcatggatttggtgaaaggggagtgcttattcattgatggtgggaatgtaaattagtacaacctctataaaaaaacagtatggacattctttaaagaactaaaagtagatctattattcaatccaacaatctcactactggatatctacctgcattagttcgttctcacactgctaataaagacatacccaagactgggtaatttttaaaggaaagaggtttaattgactcaaagttcagcatggctgaagaggccacaattttagaattgtttctcctagttttgtgaaaaatgatttatttcaaaacttacaaccatggcaaaaggggaagcaaacacgtccttcttcacaaggccacaggagagaaaagtgccacgcaaagggaggaaaaaaaccttataaaactatcacatctcatgagaactcactcactatcatgagaagagcatgagggggacctcccccatgattttacctcctacaaggtcactccccaacacgtgggaattatgggaactacaatcgaatataagattcgggtggggacacagagccagatcatatcattattccaaagaaaacaagtcattatacgaaaaagacatatgcacatgaatatttattgcagcctgattcacaattgcaaagatatggagctagcctaagtgccattgaccaataaatggattaaaaaggcatgatatataaatatatatatggatatatatatggatatataaatatggatatatatatgtatgtgtatatatatatatatacacacacacacacacaccatggactcagccataaaaaggaacaaaataatgtcttttgcatggacttgtatggagctggaggccattattctaggtgaaataactcaggaatggcaaatcaaacactgtgtgttttcacttataagtgggagctaaacagagaatacacaaaaacatatggagtgatgtaatgaatcctggagactcagaagcaggagattgggagggagggtatgggataaaaaactatatattgggtacaacatacagtacttgggtgatgagtgcactaaaatctcagaattcaccactatataattcattcatgtaaccaaaaaccacttggagatgggcatggtgactcacgcctgtaattccagcactttgggaggccgaggcgggtggatcacctgaggtcaggagttcgagaccagcctgcccaaaatagtgaaaccccgtctctactaaaaatattttttaaattagccaggtgtgatggtgggcgcctgtaatcccagctacttgggaggctgaggcaagagaattgcttgaacccaggagacagaggttgctgagagctgacacagtaccactgcacgccagcctggtcaacagagtgagactccgtctcaaaaaaaaagaaaaaaaaaaaaacccttggaccccaaagctactaagtgtttttaaaaaatcaaaagtaatacaaaataaaggataaataagtactgcaattttttaatttgcaaattttctctttattatgtttttcaatgttctggttacagaattaatatttcttataaaaattaaaatgatacatgaaattttttaaaaagatacaagaataactccatgcctttaagaaaaatgtgatacagtgacaaaaataaagcacatacacataatggctcaaggaagcaagtgattcatgacatttgattgaagagcccaagatttcagaagaggctattgccttctgcagaaggcaatgagaaataatgccaagaaaagttggctagtcctgaagggtaaacatcatatggataggaagggagaggtcatcaagggtaatccagacaatgagtgacatgatcaaaactgcagaagcgcaaagacaaagagtgtgcttgttgaataccaagttgtataggctgcagaagaggaagtggtgggactggagtctagagagtcttgaacaccaggtttgggaggctggagttcacttggtgagcaacaatctctggcagaggaagactccgtctcaaagaaagaaagaaagagagagagagagagagagaaaggaaggaaggaaggaaggaaggaaggaaggaaggaaggaaggagggaaggaaggagggaaggagggaaggagggagggagggagggaggaagagagagagagagaaaggaaggaaggaagaaaggaagagagaaagagagagaaagaaagaaagaaaagagaaagacaaagaaagaagaaagaaagaaagtagaaagagaaagaaagaaagaaagaagaaagagaaagaaagaaagaagagaaagaaagaatgaataagaaggaaagaaagaaagaaagagaaagaaagaaagaaagaaagaaagaaagaaagaaagaaagaacgaataagaaggaaagaaagaaagaaagaaagaaagaaagagaggaaagaaagaaaagaaaaaaaggaaaggaaagaaagagatcattaccagctgggcacggtagctcatacctgtaatcctagcactttgtggggccgaggcgggtggaccaggatcacctgaggacaggagttatcattttgaaatcagcctgggcaacatagcgagaccctgtctctaaaaaatttaaaagaatgaaaaaaattacccgggtatggtggtgtgcatctttaatcccagctacttggggggctgaggtgagagcattgcttgggcccaggaggttgaggctgatgatcacaccactgaacttcagcctgggtgacagagcgagactctgtgtataaaataaaataaaataaaaataaaagtaaaataaaataaaattaaataaaaattgcctgttaagtcactatgagaaagcaaacaactatttaccagaaacaagagacattgttaccaagactatgtcactaaaataacaggctacagggaggctagtttgaatattgtatataaataatcacattagattacatttgatcaagatacggcttatataatccctgtatgatcttaaatcagagtggaaatatcagaacaataaatttgcctgcatctaatggttttgccaaacaatagagtgagaagtagaggtcattcagggtaggaattttatcaccagccaattcagatatgtctggtgccttgtcatggtttcacctgaattatcttttttggccataatttcaccaactgcattagattatggcaggctactaatacccaaatgttctgtgtgttttggtaatatgagaatgtaatacagaaggtagaccaaaaagaaaagatagacaaattgtatttaaaaagcaaaaggctgatgaagattatgcttaccaagtgccgctcttaaggctgtctagccaataagttaaaaaaacagtgagccgagatcgtgtgactgcactccagcctgagcgacagagcaagactccatctcaaaaacaaaacaaaacaaaacaaaaaatacgctcaccggcttgttttgggggtcatatgatccaataggaagaagacggacttcagagcaaaaccaccctggtttgatcccagctccttctctagtcagctatggacatggggtacttacttaacctttctgaccctccattcattcatggcaatttggggtttatcgcagcatatttgctgtaaaaactgcatatattgtttcattcaaagtacatacaacaggtctggaattcaatagatggtcatctaatgttagctccttcctcctcatcctttttatattgattctgaaagagatcttattgtataattccttatgctatgagggaaatttaaatacaaaatactaaaattttcacataagaaaatcacagtatgaattttacttatttcaacttttagacacataaaagacacaaaattcaactaaagcaagctatgattattaatgaggaaatgaataatgaatgcgtgggttgagactgcgtaattggaaatggggcaaaaggactacggtttcactttccttcaaaagtttgatttgccaacttaacagaaacttgctaacaataaccagttttagaagctcctggccacagtgaaagcaaacccagtccatgtgcctggttcatgaaaggctaagagttcggggagaagatggggagagggtgtgactgagacacatccagagagcacactgtgcctctcacatgtactgcctggtggcttcactctcgtgggtatgtgtacccgcactcaaatgtaaataccaggtcccaatctcacagggctcttgcgggtacacaattaggagctctgagtgcacttggaggaagataaagaatcccaaccggcaaactttcaagtccatcttttttttgtttgttttgttttggtttggtttatgtgttttttgtttttgtttttttattatactttaagttctagggtacatgtgcacaaagtgcaggtttgttacatatgtatacatgtaccatgttggtgtgctgcacccattaactcgtcatttacattaggtatatctcctaatgctatccatctcccctccccccctccccccaccccatgacaggcccgggtgtgtgatgttccccttcctgtgtccaagtgttctcattgttcatttcccacctataagtgagaacatgcagtgtttggttttttgttcttgcgatagtttgctgagaatgatggtttccagcttcatctgtgtctgtacaaaggatatgaactcatccttttttatggccgcatagtattctacagtgtatatgtgccacattttcttaatccagtctatcattgattcaagtccatctaattgtaaagtcttctaaaagagtgttgtcctatattgtaatcacccagcactcagagatgaaatcttcatgaaattagcgtactctctccacaagtgaaagcatttatggctgtgcccccagtcagtaaattatagcagttggtgctgagctccaatgctgtttcccgtgctggccctgccccttccacttgttcagcaagccccacgggtgctgtgtctgattcgcagagaccattcactggtccatttctctctcatctggtggtgtcctcttccccaactatttgaactcaatctctaaacatttgtgccaccttatctcttgctttggtctcagctgggcaaaactttactgtttttcagggccccagctcccacctgaatttgctgtctctcagcctcaatgcctgtagaattccaagattcagaactcactgtggacccaagcagccatggcaatcttccaggaaatgatgggcacacccttgtcattataggatgagcactgttaggataacagaaaagaacagagagttcctaggggttattttgtgcatgatatatttattaatgatgggcttattctgtggcttaggaaatgatctccagtattagttgaatgccatgcagaaaaacaggatgttggcatctctgcacacagtagatacattctaagcagggtctgttcaataggcaagatgaatgtggctctctatccctcagtgtttgccaaagctaacagaaagggcaaaggctaacaaaattctgagggagcccagcaaagatatggtcttggtgaaaaaaaaaaaaaaacactgctaaattgcctgagccaatactctattttgctcttactgcagcatagaaaaacattgagactaattctgtacagctacactggagttcaaatagtgaaatcctatgagtagtggaaattaattcattcaatttccattttcaacttgtatggtttttagcttacttttgccatacttgaactttcaaaggagaagctttgttcataatagtcataaactggaaacaaaacaaattttcaccacttggaaaatgaataaattacagtgttttcataatgaaatacatatattcagagcaatagacagaacaaactgcaatatagagatgcacaagaacctggctgaatgttaaaaatatagtattgtgtaaaagatgctgaagaccagaagtttgatcagtatggagtcggcctattaatatgaaactcacaaaaaaggtaatagtattgatgatgatggaaatcagcatataattatctctgcaggattattaagtgaggggaaggcactgaaagctcatatgtctcaggccgggtgcagtggttcaagcctgtaatctcgcactttgggaggctgagtcagacggattgcttaagctcaggagttcaagaccagcctagacaacatggtgagacctgtcctctactaaaaaaaaaattaaaaagttagccaggtgtggcggtgcatgccttactgatccatttacaacctggcaggatccatgatgacaccagccgtttcaccaaatgaaacaataactcaagaggacccttggagtgacgtggcacctgctggcctcccttgccttttctgcattccaaaccctttattcaaagatgcctgtgttccctccacaaactaaagagtggaatggtgctctgctctttcccttgccagcatggatagtaagggaatcttgcttcctcttatcataactcgtgattggtttgacttgttttcacaagcggtgagcagctggacccctttgccggttacaatcgcttggacatatgtttttaattatgatgacttctaactatggagctctttaaaaggaaagaaagtccgctcaagtctcttattaccagatgttagctgggacaaacagctgatattcctggctcctgaacctttaccaaagcaatctctcaagtgaaactagtaagcctcaaccaaggttatgacttaactgaagacacgagaggcatctccacagagttgcaaagcagtcctcacaagactcagaatcactgaaaggcagctcaaggaaagtaaagttctgctggccacaaatgggatacaccttacattttgttcagccattttctctagggtctcagcttcccagctactgtctacacacagaggccccaaagccctgtaagcctccacagattgaagacaggaaatcaaaagctgttcctggaagaaaaaataatcaataaatggcaaaagtcacacaaatattaaaccaaaaggactgattccctgattctgaattttaaccacgaaattacagtgtggaccagcttccattgttaatcccacatggactccaagcaggcagcctgagtgggcacagggtttttagctttgttttaggtcattttggtctgtttgtcaaaggaattttaagggtggtcatgacactatttatgtcttttgcttttttgtttatttttaaacttgatcctaccatcttccttaaccatataagccaataaggctcattatggtggctgatcagagattgccccatcagaactaaggctctctacaccctgcccttagaactttgcttctgccttagaaggtatatatataaataaaactaagtttctctataccttcactcactcactgggtgaaggagtctctttgagtgctcttagcatgagtgttcccacaacaccttatctttatggaccagctgagtctgactgaactgggaaggacccccaccaaacccggggccaacagggaaggtcccctgcagggtccagatggaggaaaccagaacagggactggggagagaccaagatgaaatgaagggaagaggtagagagaaataaagtctctgaaatcttcaaccttaaagcaggagatcctagatttagaggaacttacatggtgtctttccagtgcagtgggagagacaactgacctgtaggcctctgtgtggtgactcccagtgatgccaagagaccctggggttctccatggatttcatcctcattaccagatatgttcacttaaaaatatacaatctataaatttagaaaagaaggagaggagactttatttcttataaagggttacagtctgcagggtggccattctaacagactgggaagcagagcctccagtcagaagccagaaacagacatttcagaaattcactctttacatgctcaacccggcatcatcaccttgatctgcttgggtttcctatccctacactgtcctctggaaaactcctccagaaaaaaagctggggcatagggccctcctcacttgcctcccatgtatctggaaccataattgtacactgtcagcattaccaatgcaggcacagtgcttttatatatttgtccaatgtcatcacggtctatcacaggacaatgagttcagtacccaaaactatattatgacctgaagaagagctcctactaaaggattttaatcaagagagttctataataccataagttatagtttttcctcctccaaaatttacaattagtagcagggacaggtcttgacacagttaacacaaggaagactagattaaatgcaaaatatatccaaaaacaatccactttggaagatgttaaaccagccatgtgctatcttgttccttaattggcaatatgtgcttctcaatcttgccagaatgtaggtttctcagtcctgctcctcttctatctttagaatcagtgctacatacacccctaggaactcaataaagacacacacgtcagtggattcgcactccaatcaaggagctagatgcatggtccagtgcaataagaggagcctagcttctccttgacccttggatagatcacccccaccttagaacaggatggtggagactgcaaaaatgttctccaaggtcctggtgagaaagcctctacatcagagaccttgtctgttaaatagagagtgagtgtagccctcacagagtgaacagttgaattctcatttgtcatattctgcattagaatgtagtagagtaattatgaattaccttttcattatgtatgtcaccccacacatcttcctatatcacccagcattaaaacacgctgattgaaataagaacactccactttaaagtgcttgtctttatgcacagtgccctagaacaaaccagccaacctctttaagtctcaataatttgatatcttaaaggcatttattcaaactcttattgcatcattggtccatttcttttccttatcagctctgtaagttacccaggccaaaaactctggtctcagtttaaaaaacccaaagttcagcaacttgaaacgtgaatttaaacagaataaaagctcatagcagtagggatcctggctcttacttttccttataatggagatgaacataatatgtgccctaaatggattgactgactgattgatggataactgattgattcaccgccatgtaggaaattatatgcagatctagaaccaaaatatctgctatctcatttttaatttcaaaaatctaattgaaattggccaactttatcccacaacagaaacattagcaccaagcctaggatgtataggggtgtattgagaaacaaagatgagattgtctttggttaatggtttcttaacatttcttcctttgccacttccatctaaacacagaacaaaatggaaataagattatatgggatagggctagagaaaagagagagaagtaaatgtataggtttcttcttctcacttttttttttttttttttttgagacggagtctcactcagtcgccgaggctggagtgcagtggcgtgatctcagctcactgcaagctccacctcccgggttcatgccattctcctgcctcagcctcctgagtagctgggactacaggtgccaccaccatgcccggctaattttttttgtattttcagtagagacagggtttcaccgtgttaaccaggatggtctcaatctcctgacctcgtgatccgcctgcctcggcctcccaaagtgctgggattacaggcgtgagccaccacacccagctcttctcacttttagtctactaaatatttgtgtaagaataaagtttacaaaggtaagagagtaggtcataacctctttcttgtactctagacaaacagacagacagacagtgaggctgtgcttggacacaggcctgtagagctagtccatccctacgaggctagagtgggatttcatccattcaatttgttatagtaattccatatcaactctctcctaggctcttaacctccaggaaatttccccagggtaaaaggtcctagcctcaccatctgtttatcaggcttcccccatcaattcctctgaacattaaatctttagctccaacagtgggttctaattaaacatttacaatttttatctttggttattctgttgttcctagcttatgcttggtaattccagctaatactattccctgcttatgataaatttattgaagtaattcttcacttttttcaaaaagagggcttattctccattcattgaacctgagatgaccttataacttgcttttgccagtagaatccagaggaggtaacacggtgccatctccaagcctgtggctcgagaggtcgggtaagtttcctcttgcttgtagttgaagctctgcctccacaatgaaacacgactgagccagctgctataggaatatgagagacatattacagagagtcaagatttccagtccttcaaagtaaggccaccctggatcagccagccagcagacacgcaactgacctcacacttatgagcaagctcatccaagatcagcagcactgctcatgtgacccacagacctgtgaatgaaaataaatggttgctatgtgaaaccaccatgttcagagttgcttgttacacagccttaattatagcaatagataattgatatgctgttattaccttatgtgttaaggtttcatttatgtttataaatacaaatacatatatggcataatatctcacatccaatataagtaacttcctaatgtgttatatctacaaacaaaagtttatttgtaatagtggcacaaaacacttccatgaaagaatgagccaccacaaatatgcattgagcaaaatgatagaatctctggtaaattgaggattatctacagaacccttttcttccactctcctgaatatgtcatgtagacattcattaactgacttattcagcagctgcttatgatgcacctgcacacactcatccctgagtgaggcatcgcacagtctgtcataaattctgctgaggaagtttcaaagccagaatctatggctttaccagaggcagaattgctctcagggatgcgaggtgacctgtctcccgagcgtacttgaggatgctaaggcaggccatagagaggaagctccctttctgccacatggcaatagtcagcgatacacttccttacctgagtcctctcagcagacccttaagttagtaaaataaatataaactattatatatccagaagctatcagtattaaatagcagtaagccagcaagcagaagctttatatcacaggggagactgaaattaccttggcaccttaccctacaaggaagctaatatcataaagtgctcaaaatacttttctgaaaaggtagccttcctgtgctcttctgagcagctgaaactcatagtactggctccagttctagatcagtttgaggcagcttgcatctggcaatttgagaggtaatgtgcttccctgaaagtctgttagaaaaaaatgagtgtcatccttgccaaatgatgggacaatttactctcaaaacccagcatgtgttgagtatcacaattctgagacgagaaaatattatttttttctctagttaaaaacatgaagtgtttttgcaaaaactaatgaaatgtttaatgcttgtctgcttacagaaaagaagctctttctaattggaaaacagccagcaaagttgttaattccaaaaaacaagtatgtctctggagttaaaaaattttctgtaaagagccacagtggctttgccatctctaacacactccaagaactagtatccttgccacacattcccgaagagattaatgttatattggagtccttagaaacaagaacataccaatcatatccttcaatcagtctcaacaatgaaaagcctgagaggtaggaatccagaagttacctgacagccaccacctaacctgcctgccccagggaggaagcaccttttatgattctctaagtacaaatatggggtcactgggagttgtcttttaactttgcctttgtcttctctgttaattgtgtcttaatatgtctgtctttgcactttgatttaaacagataaatagaaataggattgaaagggacacagatggtgagagagaagagagagagaaagttatgtttaggttctctcttctcgagaagattctggatgtagtatggagcaaacacactgcgtgatcaacttcatgagccacttcacttttgctttctgtttaaataagtaggcgtggcctaaacctagattctatgtgccagacactttacaaggattatgtaattaaattttcccagcaatcttataagagggttcgaaaattatccctattttaaaatattaggaaatgaaaactcagagatgataagggacatgtctgaggctacagcaggagggcagccaggctggtattcagtcttgtctcatggcaaagcctgagtgctgaccatgctgctggactgccttctccatgtcttctgatgacagaaggcttccaaccttgccgccacacatgccctgcacacacattccccttctacatgagtgtgggccttgctgcatctgtctggacagacgtgatgcccttgactgtgggtttttgctcctgcaagtctcttcatccttcactgcatcaatatctgttagacatcttacttcctgtcgcctgttcacactccacctgtaacacgggagcatgtctagacctctccctagcatgggtcccacaataactggtctattccacctggtaatcaggcagagcataagagtcctataaagcataaagaactgtgacatcctgtttacctcaatagatcaacaattcttgagatcaggatctattcggctcagtgttatgtacacagtaattgctcaagaaattagtctggggagtaggaagaaaaagcaagcttcagccccacagccatctgtctcctttattcttgaatctcatctgacttgtccactgtggtatcctcagagcacagggcagctcttggtacatggtggatgcttgtcaaatgtttgtggaatgaaggaaagaagaaatctaattatccagaaagaatacaaacaaggtacttgagccctgtttttgagtatgcagggtcagggtccccccagtctgggtccagccttggtcctgcctctcgttatggtgagactgacccctcaaaatctctcattcttccaaaagatggtaacaattgtggcatctgcctggcagagacagtcgtgctcaataagtaactcatgggtttcccattgcttcacagcccctttgcagtttgtctgggctatctgaagatttctggccaatagtttgtaaggggaattggaacacttcaattctcatctgatacatttaaggaaagatacaagttctccacactttgcttccaacttcacagacaagagatctaagaacttggagatggagagtgacaggaagggaccagctcaatctctgagtttctgctggagaaggatgaccagggaaactacagcagactgtgatatggtaagaaacacagccaacttgtgtcagattgctgagatttcaagatttgcttattactgcagcataacctgtcctattctgactaatataatctgttctctggaattctgaggattaaagtagataatgaacatcaactctagttcagtgtctgacacatagcagtactcaacacaatgtagtcattgttactatcattattattgtttctactaatatgattattattattaccactcttaatgttgttatcattaccaataactgtggaagccattatttttcatcttgatttatccctctccttgtctctgtctctctcacacaggtacatatgcccatggagataaacaaggttgcaggattttgatgccatttctgacccttagagctacctgcttagtgatagacactcacagaaattaagagctgggaaacagtcaggtattacacataaaatctccggagaacttttttctggaaccagctctgagaccccagctgacagttccctctgcttgttccttcacaaaagcgcagacctggtttgctggttaacaattatacattttaaacagttctgtgctctggctgcatcctcaaatgcctctgaaaaataagcacattttaaaaacacaaaaaagaataaacaacaagacagttcagcaagagaaagaaaaacataagccactgcttcattacagagccatgggcaggcctctcaaaggcagcagcttttataaatgatttcttggaaaagcttttatgtcttcaaagtgtttctgctaaaagaagctaagtgtttatcttgtgtctcaggagaggatatagcataaagtccaggtcactaaaaagaggtattctgagctcttatttatgtgtcaggcctgggaagccagcttcagaagctggctcagtgataaatcatccacatggttgctgcatctctaaacaccgcatctttcattacatcagggagttaataaatattatctattttatcaatgaagggcagtgcctttgactcagataattttattgtagaaaaagacacagtttgttgattttttaaaggttcactttaaaatatttctgagatactgagtcatttgtagggaataaacactaagccacaaaactcaaggcctagacagatattacacagcaatctttttgaacaaattggctttctttgccttttctttttggcccgttgtcttgggtctctagggaactgtgcctatgaataatgtctgtctggatgcaataaagggccagctaagtgggagaaagggtggtgtgagaaaatatgacagcagagattatcatgagttctgatgagatgaagtttaggtttgggattttcctgcttgaagatgagcctggcccttttgggctccaaactccttattgagggcatcttgctatctcctgtatctagcacataattagcctagaatatatctggtgctcaaaaatgaatggttggatgaataaatgaatcaatagggtatagccacttctcactttttatcaaagaatcccctgggaattcacccataaagcatgctattataaagctaattgcatttccccacaaaaacaatgcctttattggaggtttgttctagaccaagagctcaacatctaataaatcagagctatgacaaaactgtcttaagcacaactttgtaatagatgaaaatctctttagttgtgtgcccaagccccatgaaactacactgcttatcttgagtatgcaaagggacccatctgtgactctctacatgttcagctattctgcattacaaatgtaattgatacgtaaaccctgataaaaaattaacacatacagaatcataacattgttgtcctctgagtggatagaaaggtttgagaagtgaatttggatgacaagtatttaaattttacacccaggccgggcattggggctcacgcctgtaatcccagcactttgggaggctgaggcaggcggatcacctgaggtcaggagttcgagaccagcctggccaacatggcgaaaccctgtctgtactaaaaatacaaaaattagctgggcatggtggtgaatgcctgtaatcccagctacttgggaggctgaggcaggatagtctcttgaacccgggaggtggagtttgcagtgagccaagattgcgccactgcactcccacctgggggacaaagcgagattccgcctcaaaacaaaacaaaacaaaacaaaatttacacccatgccacaacacccaagtgccactcatcgtttcttgctgaacaattgtattatttactgactggcctcacattttatgtcttttcttctccaatccatttacacatagtaactgctgtgattgtcgaagaacagtaacctaatcttacactctgcttaaaacgcctcccacttctgttaacaggctcttttcagctcttcaccgtggcctttgaggtcttcctcatgtaaccctgagtgtgtcctgggtctgtaacacttgcatcaccctccaggctctaaaccaaggtgccctttatacattctattcctcaaatacacatttgtctctcgttccttgtgctcctgcttctgcctgtaactctttctttttttgccagtttctagttatctcagatttccatcaaataggagagccttctctgaacctcaggacaagtcaggctgccctattccccacacacccagcactctgagctccacagcaaatgatacttccagggttaagtaatacaggttatgtttacttagttaactccatctctcctccatcactggaagtctcattcttatgtctttctggcttttatcgccatgtgctcagcagccagagcagaatccaaccaagaataggcaacagatgtgtgtgaaataaactaaaaaaaaaaaaaaaagactccatcctgtgcaagccgggtcttcattgggagagcttctcaattggaaatccttaagatgtcaatggttacccaaccccttgtcaggtgtgagccggcctggtttctatgccaattgctgtggctcataagaggcttattccaagattctcaagctcatcctccagttaagccctcttaacatcaggttcttgaaaaaggaggaaaggcctgcctactgagcgcatgggtgtaaaggaaaagaaaaaaaatggcatcactcacacagccctcattttccaccaccaccaccctggccccaggatggaagacttttgcttggggcttcatttgccttgggatgggtgtggcttacagaagattccttctggactatggcttagattctcagatcactataatttcacctctcatgaagaggcagagaaaaaatctcagttgagtctgttttggaatgtctttctaagtggaaaagaatttaagcttcatgaatgaggggccgttagccttaaccaccatcacttatgaaagtgcctttactgtgttcagtactcacacctttagcaaacttccctgcccatatgcacatggatatagcatggatgtgtcccctctaaatttcatgtcaaattgtaatccccattgttggaggtggggtctggtgggaagtggttggatcatggaggtggtttcatcatgaatggtttagcaccattcccttggtgctgttctcttgatagtgagtgagttcttgtgagatctgattgtttaaaagtgtgtggcaccttccctctctctttctcctgctgctgccagctgagaagcctgctgccctttcaccttccatcataattggaagattcctgaggcctcctcagcagcagatgcctgtgttatgcttcctgtacagcctgtagaactgtgagccaattaaacttcttttctttataaattatcccgtctcagatatttctttatagcaaggcaagaatggcctaatacacacactgctgtctataagagctgagacaatttattttcattcccaaagtcaaagggaaatggggcagtaatcactctgacttggtttctcctaatgtccactaaggaggaggaatctgactctggtagctctccattatatcatttttaggaagaagagtaagattaagaaatcaaaacattattctggctgggttgcgttgaatcgagccaagctgtatttgattcatgttatgaaccaaaaaaattctgatgatctgaatgcagattatgtcaatatcactacttctgtctttattgctaaaggggaagaagatttgcaaagcacagcctcaactcaaacagtgacatctgcttaatcttttccttctcaacccctgagtttaaatcttcaccaacatagctttgaaaaaaatgtcacttacagtgataaatcccttaacattgactttagaagaaagcttgtatagctttctctcttaaaataacttttaaaaataacttttctgcaattaaagataaagataagttcaaaaagatgtttatgaagcgaaagtagtgaaaatcatctactctgatctcattttctgtgactcaaaccagaaagtctaaattcaacatgccaagttaatcatttgttgttaggtcatggccttcagtaaaaaccttcaagccaccaagagagactgcagctgtcattcaagaatgagccacctcaagaggggtcataaaggtccacttgacctgtctcaaccagagaacaagtggggccaggaaaatctactctgtaaatctcagaagcctctaaacacagatgtgacagcatcttcgcaggccctgcaggtgaattcttggcctggctttagaaggaagtatgatgtaaatacacttgcaaaagacagcagtgtgagtctgccttgagcagaaagagatccggagggaggcacaggagggaggctgcttgattatggtgtttgtgggtgggctggccacggcacttccctgcctattctgcagttgctctgcttacgtgtcttaaagagtttatttccacaccatctagaggaagatttagaggacaaatgaaatcatgatatgggtgagataaggttatgagtgttgttcactaacaaatctattcaactttacaggcctgaggctgacagttcagctgcaaacactcactgggagtggatggcatgtggggaaaataaagagagatcagattgttactgtgtctgtgtagaaagaagtagacataggagactccattttgttctgtactaagaaaaattcttctgccttgagattctgttaatctatgaccttacccccaaccccgtgctctctgaaacatgtgctgtgtccactcagggttaaatggattaagggctgtgcaagatgtgctttgttaaacagatgcttgaaggcagcatgctccttaagagtcatcaccactccctaatctcaagtacccagggacacaaacactgcagaaggccgcagggacctctgcctaggaaagccaggtattgtctgaggtttctccccatgtgatagcctgaaatatggcctcacgggaagggaaagacctgaccatcccccagcccgacacccgtaaatggtctgtgctgaggaggattagtataagaggagggcatgccttttccgcagttgagacaagaggaaggcatttgtctcctgcctgtccctgggcaatggaatgtctccgtataaaacccaattgtatgttccatctactgagataggggaaaaccgccttagggctggaggtgggacaggcgggcagcaatactgctctgtaaggcattgagatatttatgtgtatgcatatctaaagcacagcacttaattctttaccttgtgtgtgctgcagagacctttgttcacctgtttatctgctgacctcctctccactattatcctatgaccctgacacatccccctctccgagaaacacccaagaatgatcaataaatactaaggaaactcagaggccggcgggatcctccgtatgctgaacgctggtcccctgggtccccttatttctttctctatactttgtctctgtgtctttttcttttccaagtctctcgttccacctaacaagaaacacccacaggtgtggaggggcaacccaccccttcaatggcacccattgctttaccagccatttcctcagcgagtgagcaaatacacacttcaggtgagacagtccttctctcactgtgtcagtgcctgtgtttttggccaaaggtaatggcttcaacctaaagtggctcagatagggggatttaattcctcacatacagaaacccgggatagttgattccagggtggctcaactctcatcagtctgtggctccatcacgtcattatggtcaagagccattttctgtaataagattgtttgagttcgggagccaggcctgcccctgagcttctttctgtctcagtttctccttttgtaaaatagggtaacaatggtatgttaacattgtaaggattaaatgagtaaatttgtgtaaataatgtagaaaagtgctggttctatagtaagtgctctgtgagtagtagctaataatgttaccaataaatgtcagcagcctgtcctactctgatatcctcagctctggcatttcaccagggtggaattcttcttcctgctctgacattccaaccatatagaattcttatgtgatcccttggatgaatacagtgtcatgtgtagatgcggcacaccccacagagaaggaacatccttccttttagttatgaaagcctttcctcaaagttccctagcttctcaaactatctgagatgaagaattagtttgtttttattttcaatccattatgaatcaatatttttgtaaactacaatacaaatcaacaaattaatgaaggaaaatatatacaaatccaagcttcaattatttattattattagatttagcaagcataaaattagtccattaaattactataaacatttttagatgcaaaaatggcaatctaagtccatgaagtggcaccatattttgtgtgactctgtttaagcagttatcactggagtgtacccaagggccaatgctgggtcacatggctaggctaacacaatctctggaagaagaagaagaccatcgtgactgggccagcaaagcctctgctccattggttccattcaacacacacacacacacacacacacaaacacacacagtgcctactgcgggcaaacagctggccaggcagcctgggaggtgtcccatgtggaatgctataaggtggcatgctataagacaataggcacaaaataatattttgacaagggtcccagaaacggctttgtacagcagggagggttcaagctgactcttggctaatggtgtgtgctgcttcaacacagtgacatgtgatgggagaagatactccaggcagcagaaacaatgagctgcagctgaggggaaagaaagttgttcaaggtacagggagtaaaaccaaaaggccgtcatgccaaaatacttattgtagagaaaaaaataatgtggcagaccatcttctcactacttagtgtgggatttggaatgggcaaaatagtggacctccaaagatgtccacaccctaatccctgaacctgtgactatgtcacctgccttgagaaaaggaagtctgcagatgtgatgagcgttctggaccctgaggtggggggtaccctgaattacccaggggggccttgtgtgtggacgtgggaggcagaagcgtgggccagagagaagccatgacaagaagaagaggcaagagcgatggtggcgtgtgaagggtgtgacaccccatgtggatttggagacacaggggacttatgtgcaagaaccaggaggaaatgctgggaggtaaagatgattgccaactgctggccacacggaaacactgccctcagcagtgccacttcaggggctgaattttgccaacacctgaatccgcaagaacatgtcttctcccctagagtttagtgaaaggacacagccctttgaaccttttgattttagcctggtgaggtccataccagacttttgagccacaaaactctaaaataatatatttgcattgtttgtaaggaacaacatttgtagtaatttgttgtcacaacaacatgaaactaatataaaattcatctgtaatttctcttttttaatgtggtgttctggacccgaccttcagaggttctggcttgtcaactggggctagttgttttaacaagctttccaagtgtttttgtctcattccctttcttagagttggagaacacagaggcccaagctctcatggggaatcagcatcagacaagaagctggcctccagctctccagatgcccaagcctgggctttccatcaagaagtgtaaagaagaagctctgtaaagtggagatggctttggagtaagattaaccaggtttaacacctaatcttgttacttattgctgtgtgcccttgaataacttacttagcctttctgggccccagcctcctcatcttatagtcagtgatataaacacctacctctcaggtttaaatgatctcattgtgcaaaccattcacgcagtacctaccacatagtaaatgctaaagctattattagatatgtcctgcattttaccaggcaagaaaataggagccacataacttcaaaatctctccatacattgctgatggctgcatctgtgtcctcccaacacagtgctcctcagtcaggaagaacaagtgaattcatttgttcattaaatatagtacaataatattgactccacccagaaatgttcattctattgtgtgccaggcacagtagatatgagaaagacctgtcactgccttccagaggagctcccagtccaggggaaagtgtttctcaaagtgtgagacattagaacccctgccctgggtaagataagagggaattgtaggtgactcacagacacagtataaagtcacatcactgcagagtgaaaagttactgcatgttcagtcaccttccatgcttctgattacatttaggaaaaggtctgagtttggtgccagcctgtctgtcgcctttctatcactggctgatctcagatatagagcaggtctcatgcctgctttgacaggcgacagagttctgctggaactgaagaatgttgtccagtcaccgctttggcaactgttattggtgtctcatctacagaggagatgctaagcttccttgtaaattttattgatttattttctatttctgattcgggtggttggtacatgggcaggtttgtggcatgggtgtattttgtgatgttgaggttcgggtttctaatggtaccattgcccaggtagtgaatacagtacctcgtaggcagtttttcagcccttacccttcctccttcctccccacgttcagagttcctagtatctattgtttccttctttgtgtcccaacttttacctcccaacttatgaatgagaacatgtggcattcgcttttctattcctgtgttaatttactcaggataatggcctccagctgtttctgtgttgctggaaaaaaaaaaaaaaaacacccataagttcattcttttctatggctgtgtagtactccatagtacatatgtaccacattttcttttatgatagaaagcatttatttatttatttatttatttatttatttatttatttatttattttactttaagttctgggatacatgtgctgaatctgcaggtttgttacataggtataaatgtgccatggtggtttgctgcacctatcaacccatcgtctaggttttaagccctgcatgcattagggatttgtcctaatgctctccatctccttgccccccacccctcaataggcccctgtatgtgatgtcccctccctgtgtccatgtgttctcattgtttaactctcacttatgagtgagaacatgtggtgtttgattttctgttcctgtgttagcttgctgagaatgatggtttccagcttcatccatgtccctgcaaaggacatgaactcattcttttttatggctgcataatattccatggtgtatatgtgccacattttcttcatccagtctatcattgatggacatttgggttggttccaagtctttgctattttaaatagagctgcaataatcatacgtgtatgtaccacattttctctatcctattcaccattgttgagcacctgggctgattctatgtctttgctattgtgaatagtgtccttgcaaatgttaaaggtgaccgaacttaaggaaaatcattaagacagtaatagtatgaataaaacacagacacaggaaaaatcatgaaagtaagacacacaagatgtttggacaaccctgtaatagtaaataaagacatgtaaacatttgcaaggttgagcaatgagagctaagtatatgctaggcaaagggagtgcagagatgggatgatcaaatttggctgagtagggaaacatcttgcaaagaaaggagatgcttgagtttcaataatacatacagatgagtgtttcagggagtggtgagtagggagggaggaactcctgtcagaaagaacagtgtgttcagaggcacagctgtgccacccagcactatgttcaggaaactgctgtgaactaaatgcttctcatagaagagttctactttgtgcacacagtcaccacacttgctgggaaaatcctatgtgtgtgtttgtgccacttggaatgcaacaattagtgtttaaaacctcatagaacatatgagtgtctttctgctctatggtttggtgagcaaaacttcacatcaagcatccattcctccttcgactggaaaactggatgtttttggcctcagaactttgcattagctttcttcattgtcttaaacctatttttaaactgaaatacacccataaactggccgagaaaagacaaagctgtatttgttaccgaatagcatttcggaaggaaaacttgtcagagtccttcatgatcactcacacagttttgttctttccaaagcaggggcgtaagaagccaggcccaggtgcatccttaaatgttaccctccactgcctaatgccccacatgccagcaggcgggattctccactacaacctgtcagaggatgccttgctcatctaaatagaatgccaggctccttcgtaattaagagcagcctctatatgtattgtcccactgaagaatattaaggacaaaatagttagctgtctgttgaaatccattatcagaatgttaactgaaaacattgcagttaaaaacttggatgatggataacaagagagaaagaagaaaagaaaaaacagaaggaggcttatgtatttgaacttcagagcaagccctaaagaccccaaggctatgatgagatcatttcctccagagatgttgtcccctctgcttggagctggcctctgttggttgagttaatggctttttgttttggtttggttttttttgttttgttttgttttgtttttgtttgtgtgtgtgtgtgtgtgtgtatgttttctttttgagacagggtcttgctttgtcacccaggctagagtgcagtagcgtgataatggctcactgcaggctcagcctcccaggctcaagcaatcctcccacttcaggccctcaaagtagctgggtctacaagcatgtgccattttttaagtttttgtagaaatggtgtctcactatgttgccctggccggtcttgaactcctggcctcaagcaatccttctgccttggcttaatcccaaagtgctgggattccaggcatgaaccaccacacccagccaggcttataagaaggtgaagattctacactgtgcccagatttaacaggaaaacccaatagttataagctcaagctctgaccacagaaaacctggagtctcaagcccaggccccagacaagcaacatcactcactgggtctcagtattttgtgtttaaagtgaggatgacaagcaatgagaaaatgcacacacaggatccagcacagggcccggcacagagcacctgctcgggagtggccgctgctgccctcagggacacttcagctgaaagaggtctaggagtgtgagtgggactctgccgaagctgcacagctggctccatgaaggctctgtgcagcggcaggaggcagaggaagacatgctttcactgggctttggcctcactgaagtgacaccaaaattaattaattaattaattaaaataaaacaaataaacccctaagttctttaagtacaagaggaagagttcagcaccctggtcctgatcagtcctggaagatgaggcttctgagggcgaggcggcaccagggcttccccttccaatgactcttccaaaccactcaactcactgaagactgagtcattgctgccattgtattgttgttgttgtgtcatcgttgttgttgcaaagctctgcactttactatcagaaaggactaatggaccaattagggagggttatgttgtaacattaccctcaatacacaaccacgaggtgccaaacatgtctaagagacacagggaggatggggtgcactaggctgcctctgttcccaaattctagccttgtggtgaagacagatgtgcaaacagccaactctagtgccagacagagtgtgatgagctctgtaactcaggactgcagagcagggagcaattcactgtttctgaaggaggaggcagcaatccagccaatccttagaaggtaagtaggatttcaataagtagaaaggggaggaaggcatgccacggtgaaagaacagatgggatgaaagcccagaaatggctgtatgggaagaagggaccacagccatcctgtgaattattaagagttatttttttaaaaagcatttggattccagattgcaaaggatcacagtaacagatgataggggctgaggagacagccactggcatatcggcatacgggtcacatgttcttctacctatcctgaagtcccttggtacaaatatagactcctgttcaagttgtctgttcacctgagtgccccccaggaggctgcaggctcaagagctgagactgtgactggttattcttcatctgggcacagaacagacaattcaaatagagctgcaaggcctacaagagtacatcattcactcccaggaaaacgaaagaagcctcactttcctcctccagaatcattcttggtgaacattgttctgctttagcattgacttcaaacacctgtaatcaccatgactaccaatgcttttctctccaagcggatcaaatctcactactctggtttggactattgcaggaacctcatgcttaccctgagcccccacgccccaaccctgcaaccacccctatgaaagcagagcgtgagacagctgcctacaggcatccataaaaaatggactatgatcccagggaataggaatggggcactaggaagggcaaggcagaaaaggatggtcagccaatatggtgccaccaatatgggcaactggttcagaactctgccatgatcctctgaggagccatttaggatacactgcaaatcattccagccagaggacaggaggagtattcatccattgtctccagcctcccgttggtcaagtgtggcccccatggggctgcaaattccctcacaatttcaggtcacatatgcaagctttcaggatggctctcacagacacttcacagtatcagagaagcactagaagaaggagaaaaagatctacatggcgcaggcaaaccagagtgctggctgtttacacctgcaagaggacaattgctgtagcaacagacggaataaaaggtagatggaaaaggcataaggtagagaagcctggcatagtgtccagtgtgcctgttaacttgtctcttccacctcagggtgagtctaacctggtgactacagcatgcgaggtccctccatagtgaggcctccactgggcccagcgtcttctactcctgtgactcccagccatgttccagccacaggtgacttccccagagtgaccgctgtgctctggtaaaagtgactctttgtgccctgagtgttctctgctctccctggaaaatctcctatgcagattttgatttatttcaaatagttcctcgaccgtgaggctcctctggtgctcacatagacacaccggcacctcttctattcttcagcaacactttggaggttgctctcaatcaaacagaaatagaaatttagttttattcatattttcattctcaatttttaattaattattatattgacatatatttcacatatcataaaattcatacttttgaagtgtacaattcagtggggttttctgtttgtttgtttgtttgtttttgagacaaggtctcactctgtcacccaggctggagtaaagctgtacagtctccgttcactgcaaccttcgtttccagaactgaagcgatcctccaacatcagcctcctgagtagctgggactaccaacgcacaccaccatgacctgctaattttttgtatgttttgtagagatggggtttcgccatgttgcccaggctgttctcaaactcctgagctcaaagtgatatgctcgcctcggtctcccaaagtgccgggactataggcatgagccaccgcacctggccacaattcagtgtattctaacatagtcacaaagttgtgcaaccaccacaactatttaattttacaagtttttcatcaccccagttagaaactttctagccattagcattccttcagccgttttttcctttccctaccccctgagaaacactaatctactttctgtatctatggatttgccttttatgaatgcaaaaggatgaataaaaacttgggaccccaattcactctgtcaaaagaaaaaaaaaaaaaacatgaagccgaaagctgagtcatgcaagaagctgcctctccttttgttcctaagtggagagctacagatgaaaggctacaaatctcaacaggtagcgactctgtgttcaccttatcttgtgtaaagagacgatttactgagtgtgagctgaatatctaattgacaattccccaactgcttcttttcccttgtaacatatggattgagtaatgtgaccatgccctctttctttctcctccagacacttttcccattaaatagtaaatccctcaaagtcatcttcggagaaaggcacagacctgtctctcgggtgtgcatccttaaccttagtaaaataaacttctgaattgattgagacctgcctcaggtactttttggtttacacagacatttctaacataccgtactatacaatgtgtgccatttgggtctgctggctttcacttggcatattttcaagatttatccatgtggtagcatgtatcagtacttcgtcttttttacttccatataatatttcattgtatgaatatgctacattctctctattgttcatcagttggatcttcgttttgttttcacttttcagctattgtgaatagtgctgctgtgtcttgagtgttaagagggggacatgtcaagggtttttctccagaaattcttaagcaaggaagaggagcacacaggagacacccttggcctatccacccatcctactcttctcgcctgggcttgcctttgttcctttctcctttgctctctgttttggtaaatgcttgtttactgctgagttagttgtctatgttgacttagttttaagtgcatagtaggtaaagctatttggcagttctgtaatgttactcacaatatagttaaccaaattttttttcttagtgtcatatttggtcactagcgactctcttaatggtctaacaaataaaagctccctgactttatttctaattcagggtaaatgaagaataaactaatatttgaatatgattatgaaaaagtccctttgggattgctacagtaaatatttattaaattgatgtttttatgagttattctcagctttaatagcactagggacacactagttgttggataaatactgattctctagcactagctgggtgtcctataatgcaattcaattctgacactctctgcatggagtcagcatctcatctcacacattaagagattttctcccacaggacaaaccccacttgaggcccaagactcaggctacctgcacttctgacggagcagctataaatggaggggctccatgacccccttctcaggtagaattatttgatggaagggctcacagaactcaggaaaacatttccaactcagaaacagctcaacggaagagacacttagggcagggtgtggagggtggagacacagcttccatatcctctctgggcacaccaccctcccagcactttggcatgttcaccaatctggaagctcatcctttggaggtttttagggaattgtattatgtaggcatgattgattatgtcattggccatcagtaatcgaactctaactgcagcccttctctcctcccagtagctcagcaggcagagctgaatgttcagtcaagcctaatcaaagcttagtctttctggggaccagctgctatccagacactcccaggaaatgactctcaaagagccacctcactagcactaatgcaggtatggttgaaaggggtttgttatgaataacaaaagttactcctattattcagtaaattctaagggttttaggagttctatgtcagaaagcagaaacaaagaatatatatatatatatatatatgctcatagagtaaatggataaaaggaggggaaaaagaaatagtgaaaagatggaagaaaggaaagagagagagaaggaaggagagagggagagaaggaaggagagagggagggagaaatggagagagagaggaagaaaggagagaaggaagagagagaaggaaaggagaaaaggaagagagagaggaagaaagagagaggaaggagagaaggaagagagagaggaagaaagagagagagaaggaaggagagagggagagaaggaaggggagagggagggagaacgggagagagagaaaaaaggagagaaggagagaagaaaggagagagagagaagaaagggagagggagagaaggaaggagagagggagagaagaaagggagggaaggaaagaagggggaaagagggaaagagaggaaggaagaggaggaaaaaagaggaagggagagaaggcaggagggagggaaggggaaaggagaggaaggaaggaaggaaagaaggaaggaagggagggaggggaaagaggggagggagggaggggaggaagggaagggaaggaaaaaaagaataagaactctaccactaatgctacctctgttgttggtggggctatattaaatctcccagattaaaaatgtttggccaacactggcttaaaagcttcccctaaaaataccatttcatcaactgagtgaccactgaggctcccaaataaacttgtacaaaaacagtccccattgattatttcagcccacatctcaaccatggctgcccttgggctcaaagctcacatagcaagaagggacttgcggttgacatgctggcaactcagcagctagagcagtttggaattggatgagcattggctgctcccaccctctcttttctctgaaatgcaaataagccctaggtaaggacatggtgagcaaagctgggggtaatccagcttattgtagggggcaccagcaggtctccttccatcatgcatcttaatctagataaggaagtgatgctggtttaggagaatgagttgcttctttgttggctgtggactcgcttctgaatatctgcaaaattgtcaggagaataaacaaatttctgcttgcctgtgtatatgacaagttccaacttcttcaccaattaaagtccgagccacctctaccccaccaccattcatcatttccacagtgggaaaattacacagtttgcacttttatatgtggtagcaattaaacatcttctggaagccaaaattcatagcaatgcagaatgatgatatagaaaacccccgtgcaaatgcctaatgtcattttttctccaaagggctataggtgttgcaaaaatccaggagagaggaaagtcttctagttataaagcagttgcccagtcgagttattcttaaactgcttttgtgccaagatatctcttgatggaaaatgtctccatgcttaatgtggaccatggacaacaacatgggcaagacagagtagagttatgtgtaatgtgtgacatagctgcagcctttctcccctattcctggaagtgaatcagaatacataaggatgaaagccatgttgctctagggaacaacttaaatctgttttcttttttttatttttatttttttagatggagtctcactctgtagcccaggctggagtgtagtggcacaatcatggctcaccgcaacctctgcctgctaggttcaaatgattttcctgcctcagcctctcaagtagctaagatcacaggaatgcaccaccacgcccagctattgtgtgtgtgtgtgtgtgtgtgtgtgtatgtgtgtgtttttagtagagacggggttttgtcatgttggccaggctggtcttgaactcctgacctcaggtgatctgcccacctcagcctcccagagtgccaggattacaggcatgagccaccatgcatgaccttaaatctgctttcatttacacaagaacaaaaaatcatttacaaacactactactttattattaataaatttcctggaggaatcctcactgcagtcctcacaattgttcacaatagcacctccttatcaagatgcaaaattgagaattgctagtctagaaaagtaaaccagttatcagctaaggtctccctgacctctaaaatttagaaaggataatctttataccgtgccctggggaaggccaatcctggcctcacattcccacaaacgcatggggaacttccatcttgtggccacctaagtcttcaacttcctgcttcctctctcctgcatcttgaggcagtttctgtagcttcacacacacatacacatacacgagagagagagagagagagatggcatctgtgtgtagcatattagcagagcaagtaagtggttaagagcaagttctagaatcagactgcatgggcttgaaggttgattctaccgtgttataactttgtgatcttgggtaggtcatattatctttccaagcctccattgcctcatagttaaaatggagataatagtaatactcaactcctatgctgctggaaggattaaatgagataatgtatgtaaagcattttgtacagtatttggcacttagtaagagctcagttaataacagctttatcaccgtcatcattaggactggaggtttgagaagacaaaggggttccactgcagtgaaacacacaaagcaaactctaaaactggtagttaaacactcctggtcttaatcacctggccatgtgctcagccatccttcctctctcatcctctttcttcttcccttttctactcttccccaatccatcctttgctcatttctgatgcctgccagtttgttttctgatttgaagccttgcttctcactaacaaatgtccccatggtcctaccttctcccgccagcaatttatcaaggtatttggttagacaaaagcaatagtctttcagttcctatgataatattttttgtactatactctagaagttaaaaccctaagagatgccagctccatgcaatttcctgccgctgcaaacaaactcactacggtttttaagaaaacaggtttttattatttggttgtggtttactattggcagtgatgtcaactgcaggagaggggagatgagtgtgatgtgtaagacaccacccactcattgcagaatgtggcccaatccccactccatcttgggcttcctttcactcttgcccacctgctgttttgcccatgatataatacccattctattccctggaagagataagaaacagactacccttatgtccttgaattttcctgacgtgcctggacagaggctcgggtcatgacagagagcccatcaacagacaggccacgctctgcccaacagagccctctgccacctgctgccgctgctgcttatggttgggacatggacagaagcatcccctggtgtttttaaaatatggccttggtgctgatctaccttttaggcagctgtgctttttctaccccaatggttgattgtgtcctggctttatttacttaaagccagatctcagctcttagttacttgccagtgaggacagaatttgccaagtgggtgagaaatgtgaagtttggagatccagaaatcaagtcttttggtcaaaaatctgtgcagataaatcagaatttaggaaaacagtaaaaaggggattgaccctaagaccctgggcaacccagcatggagaaaccttgcaccatcttagcttcttagttcaccttcttccccacatccaatcagtttgcaagctccatccaaccttcacacatctcctagatccttcctctcttctccctcaactgttctcccttccatcttggcgctgcagcagacacattttatgtatccgttcagacccttgccccctccctggtcctcggggctgcagcctgacaatgccctgcctcatgcctagaggtttccctgctgataaggcaggagatgcacagactctctatgtgcctgtccctgtgcagtctggatgtatgaggagttgctgctccatgggaccaattttcgtcaaggaaaaatcctccagaacataaactccttttctattttcccctcggatgcactgtcctggaagcagttagttatgtgcctcatgggagagaatgccctgatactaagctgtgtgcttgacacagggcagcagcagctcaatggcacatgcactcactgactctcctcccactgccgcaccctaccctcacatcattcattccttcaacaaacctggattaaatgtcagatgttgtcctgtgtcctggtacaatgcttgtcagtaatatagaacacctgtctctttcagagaaacccaggctaaggcacacgtgcatgcatcacctcacatctggaggactgcagaggtttcccaatcagttttcctaactctagcctctttccctgcttgcttttcctatgataaatattttctccttcccatctttattcctagttattcaaatgttcccatgtatatgcatttcaaggcccagtctggtggacatcttcccaatacttctttattttggaaattacccctcactccattcccactcatgggtatgggtacagtgacactaggagctaccacattcttccatgagccatctccatcatccccctccaccagagttccttggtgctgaaacagaccaatcagagttcttggctgagatattttacaagagaatttaataaaagattgattccctctttagtcacaaactaaaatgtgtgagcctccacagctatatttctcgctgtgtggggaggggatccaccgtgaggtagaatgatgcccacacaaaaagaagcagaggagagagatggagagagtcccagaagcattcaagtccctgataacagaggcccagccatctctctgtattttctatgcctcaaatgcttgaccttttccgcaattatatgagataccccagtattcctccaatactttcttactttttcctatgcaagttcaagttcaatgttagcttctctcacataatttattcattcaacaaacttctattaaatgtcaggcactgttctacatgttaaagtgtcatggggagcaaatcagataaagtcacttccttaatatcgtatgcaattttactgaggggaaacagctaataaaaaagaaaataatttagagcagtgataagcattagagaaaaaaatcaagtggggaatgaaggaagggatgttgtatttagcctcgtcgagggaggccttgctaagccagggataaatcacagataataaaaaaaagccagccatgcaaaggtaaaattggatgtaagagctataggaagggaaccgacttggagtgttcaggggcaggatggaagccagcacagccgggcacagggaggtgaggctagaaactcaggcagaggccaaagcaggtggctccttggaagacagagtggggagctgggtgctattcagcccagcatacccagaaaccttcccaatgccacctcccttttcatttgaacctgtcagcctgagtggaaagttcaccatagggagagctaagggaggctggagtccctctcggagatgacaaatttcgaaccacttactccagagccatgtcaggccctggggttttgctcccagtctcaccatggtaagatgggaggacttttcatattttatggtcttctttcctcttttaccgatacatgagaatttgatttttaaaactcctccagctacataatggccccaaaactgattgtaacaagcagaaacattcatgcccagtggctcttgcctggttccccatgtgtacccatttgaaaatgaatggacattatggaaacttgtaggcagacaggcggatgggagagcaggcagcaagcgctcaggtggagggcacgcatctgggctccaggccatctctgtctctcagtggccaagaggtcctgccttactcagaccagacagtaaagttattacaaacattgaagtctgtgtgccctttctggcaaagcttcagtgctagaatgatgatttcagcttctgtttacactgtattcagccatgtgctgtatgcactgcgtgcattatcctacatgatcccttggacaaccctacaggataggtgctcctgtgtccgtttcacagactaggacactaaggttcccataagtcctggcacctgcatgctcaccgaggctgtctctgccgctcatctcctgggcccatttcacagaggaagactctaaagctcctgtaagtcctggcacccgcctgctcgccaaggtaatctcctgctgctcatctcctgtgctcctgccataaaggtctgttctcttttcctcaaacactcaaagtctgttcctgcctcagggcctttgcactcgcttctgtctctgcctggatttcttcaccaggccagcttcttcattaagatttcagtccaagtgttcctgctcagaaaaaactttcccaggcatctgggtgaagtatatttcacctacctcagctgctctcttttccatttcctttttttgttttataaatagcctatatcactacctagtacttcctttttttttaaatttgtttgccttttaaattgactgaccatactactggtagaatatgagttttacgaaaagcagcaccaggtctgtctgctcagcagcgtgccccaggcatcttgcatggtgccaggcctttactggtgcatgatcctcatctgttgagcaatccataaatgagtgaatgaatgagaatttgtccagagtcacacagctgccagcacatgaagccctaaggctttgtggaacacggatttgtgacaaaagttgacagcaatttcaagctataattctgcatctcaatacctgattcatgcatccatttactcatctatgtattcagtggacatttactgcggttcccaccagatgcctgcactgtcctaggtgcctgggggtcatgggaaatgagacaaaatgtctgctttctgagaactggcactgtagggggatcagcactctgtgaaggtgtcatcatctaacttaacatcaggcagtgataacccctttgtagacagagtgagaggagttgcctatttgtgcactgaggccagagaaggcctgtccagaaagaaagcaaaagccatataagtatccagaagagaattatagaagatagaccataaagtgattttcttggagtcagttttggaatgtcaaagaataaaaaggacagtgtgggtggaactgaatcagaaagtgagaggggcaggagctgatgtcatcaaggcaggcaggagcctcgccgttcaggcagaggcgccgtgaggacaccgcagtctctctgaggacagacctacggagaggattctcagtggggacagacgtgattggattcacatgttagagagactactctggcttctatctggagaagaagttgaggaagagcaccatggaagctggtgtctcatctcctgagggcgagccctgaatcctgctgagactgcagccactgagctgaaggacagagggccctggggcacatggccatcctaactgctcaactttcttaggaagggaagcaagtcgcagaggaggagtttgtgcaagggcctacataaaattggggtgtgttttgttattaatataatccgcaccagctctcggtggtgttcggatttgttgctttagtgaacactaaactatgctccctccgagggaaacgtcattggaactcccgtcccaagtgtacgctgctgccccatgtcaccttcaccctcagtcctctctgccttcctaacagactgaaactccaggccacaattcagacagctttttatttattctttcaattatctatttacttttccttcttacatttactttttccaagattgcctgtggattctgagaacatcaggttctgaaatgtggccttcgtaactgttctcagtcctgattccaagcagagcctggcttggataaagatccctgtgtctcagcactgccaagcggggatgggtaagcagaaattcccaaatcgctcctatcagtggctgttttaaatctgcaaatgtccccaggcttgcagccagggagaccagcactatggctaagggcttatgagctccctcaggaatctgcctacctgccctttccttagtcctctgacaaatgtcctcagagccccacactttgaccaggatccccactgttcctgttaacaccctatgggggtggggtcacagaggtgctcatggaggggccgccagagctcgccaaggtcttcagcaccctcctgtctaactggccacttggtttagccaatccttcagttcaaataactagaataaccttttttgtcttttactaataatatgttttgctgactgcatccactgtctgttaggcagcaaagagtctttaaactgtggaaagacgggacacgtgacgtgcctctctctttgtcccttgggcagaaatgtgctgagagaacacttccacctacctcacaatgttgaatcctcaccactacctgtgagtcttttgttccttttgtgtgtgtgtgtgtgtgtgtgtgtgtgtgcgtgtgtgtgtgtgtgtgacagagtcttactctgctgcccaggctggagtgcagtggcaccatcttggctcactgcaacctctacctcccaagttcaagcagttctcctgcctcagcctcccgagtagctgggattacaggtgcccagcaccatgcctggctaatttttgtatttttagcagagatggggtttcatcatgttggtcagactggtctccaactcctgacctcaggtgatccgcccacctcaggctcccaaagtgctgggattacaggcgtgagccaccgtgcccagcctctgttcttattttaaaggcaaaaaactgaggctcagcaaggaggacagtctgttcagcaccacagagctagtcaacgttgtgatctgtgctagtttcctggggctgccttaataaagctccacaaactgattggcttaaaacaacagaagctcattgccttgcttttctgcatgctaaaagcccaaattcaacacgttaacagagctgtgctcctttcccaacctccaggaggattcctgtccttgcctcttctcacctctagtagctcagctgctctttggcttgtgatagttgtggcagtatcgcgccaaactctgcctccattttctctcagtgcctctgtctgaattgtctttttcttataaaaacaccagttctattggattaaggatccattctattccagaatgacctcatcttagctactcccatctgcaacaaccccagtcccagataatgtcacattctgaggtactggtagttagaattccaacagaccttttttggaaaacaaaattcaatctataacatgatcctagctacaactttggtgtcttttctccaatttcaaggcaaattcatctgctatggggaggaaatcttccactacaccagagtggccatcgagttagaaacagaagctataccaggcagtttcgtccttgtggctggcaggatgacacatgaccatttgcctgggaaagtccaggtttatgcctgtgacccagagtaaatactaatagtgccctttccatctcaaagttgatgaattttggacaattatttgacatcccacttagagtagacattttctggagcatttagtaagtatcaaacactgtgctaagacagtcacaagcattgtcttagacgataaccttataacataattgtccccacctcacaggtggaggaacccaggaactgaacagccacagccctgcagctggcaagaggcagagccagggtcttagctcaggtgggtttgattcccaaccctgtgaacttcatcacggtatcctagtgccccctgggtgcagatggagcgcagattcctattttattattcagaaacttcaacgagctgagctaagcctcttctcagccttcccttccccaagctgatattttacaaatcgcaaccataatcaaacaattgttcttttgaatgcattgcgctgattgttctgaaaggaaagtcataggctgatgtgttcctggatggagcagaatctatcatttttctactcaggaagaggctggctctgaaaacacagtggaacaaattcatcacccgggaatggcgctaactgcgtttccacagaggccctgcagctctggtggctgacactgggggcaggtctggatctctgcagtgaaattgtcccttcaggttgggtgccactttgatatttaagaaggaagattccacttcacacaagtgaccccttttgctaagaataactccattagctgctcttgaagcattgtggatcagcgattgtttagtagctgcgtggttttggtgactgttttgagttatacatgttgtgtcatctgatgaagaagattctcattttagtgaaagtttgaggagtgagtgccatgcctgcctctgtgagccctgtcctgaatgctagcaggcatcaccttggattgaaagctggaaagttaactctgatgcaggaatacaacaaaaaacattcagtgatgcaccttgtttaacaaaaccaaagattttgtccatcccgtcataaagacagcttctggtaaatttggagaaagagagggatatttcttatctctccctgagaaagtgcaggctacgtcttgcacctgtgccgccaccttctttaatgggccgagtggtgcaccctaaaatttgttgaagccctaacccctaatgtgactgtacttagagacagattttacagaagtaattaaggttaaattaaggtcataaaagtggaatcctaatgaccttagaaagcggatccctttgtctgcacgaacacacagtaaaaaggccgtgtgaggactctgaggaggccgctgcctgccatccagagtgagagcccttacaagactctaaccctgctggcaccaagatctgagacttccagtcttcagaattgtgagaaaataaatttctgtcacgtaagcctcccagcctgtggtattctgttatgacagtctgagctgactaacacagccttgatctccatagcccccaccctccacactgacatgcttctctcaccctgaggactgatccttttccttcattccccaaaagcaccacactttcataaaagcttggaagcatgctgggtgactgcagcacagagcttataacaaaatcatgaatgtgattgcagacataagtcttcctagagataaacctaattgacaacttccccctgtaggaaattttctacggcccttatatcagcatgctgctacacttttcccagcacccttcttacacctgtcattttccctgcacttcaaatgagaaggaaattccttctatagagtctggggccctgtgcccatgtaggggattttctcaagaagacctcgataatacagggagaacaagctattgaagaaaagcccaaaattcaagtaagggtgagaactgcaacctccctaccaaactggtgaggtcaagctagcacccctgatggcagacaccggggagctacaaggaaggaatgtgggcacaaagtaaaaactgtgctaaattgccaacgtttccagttttccagctgtggccatggtagccaaagccatcgtagcccagccaaatttactgagcatttctggcttctgtctccacaaagccagatgaaggagtaaaagggaagacttggaagcctaatatctctaagacactataaagacaagaaatggataacagtggtcaccaggaaggaggcaaaactggagatctggagaacagaaatggaataaagacttcatttttcactctagattctcaattttcacttagttttcagggctttttttttctaatcatagattagcaattaaacacttttaataaaatgattttaacagcactaaattacataagaaaaaaattcacagtgctatagaaaataaaccaatggccaatgaacatagaaaatgctatcaacatgactcatcattaaataaatgcaaattaaaggtagtaacaataacatccaaattactcctcagtgatttctcaaagaacttagaatggccgtttgaaccagcaatcccattgctggtcatatatccaaaagaaaagaagctgttgtaccaaaaagacacatgctcgtgtgttcatcacagcactattcacaatagcaaagacatggaatcaacctaagctcacatcagtggtaagctggataataattccatgtacaccatggaatactgggcagccataaaacagaattaaatcatgttctgtgcagcaacacggatgcagccagaggccattatcctaagcaaattaacgagtaaacagaaaaccaaataccacacgttctcacttataagtgagagctaaacactgggtactcacggacataaaaatgacaatagaaattggggaatacaaggttgggggaaagggttgagaaactccctattgggcactgtgctcgctacctgggtgatgggatccatcataccccaaaccttagcatcacgcagtatacctatgtaacaaatctgcacatgtacccgctgaatctaaaataaaggctgaaattatttttaaaaatattcctcactggccttataagtaggctatattctcagcttgccagaaagactattttaagagttgctttttaaaaattttcccaagagttaatctgtcaatctaaaacttcttttccacttgtaatttcatagcaaaaccaatacatatatatttcctgaaggtggggagaaaaggagaatgtgaattttctcttttaaaaagcaagtgtcaggggttattacatttcagaggttatcacacaaatccacaggctttgggtcaggctataactctgggaaacaggagttctctttttcactctatccactttaaaatataacttagaaaagtaatttatgtccttcttaaaattccactcatgtttactgcatgggactgtgagtagaagaggcctccaggcacctcacacaccacaacaagcaggaccatattactttggtgacagttcttatatatgaactattgcttagagcaatggggatgcaagaaggccgcaaagacttcaagtggaatgcatgcatctgtctatcaactttcaggccaagggggagtaaacaagagaaatagatccattaataagacaaaaatgtcaagaatagacagacatcaacagaaattacagtctctgaagaagcagtagcaatagaactgctcagatgacaagaaaaggatagtttctgtggataacactgttaaaagcatttccacatttatttccttctgtttgcaaccttaagatgtgcaaaatgttaaacagaatcaatgcctggagaataaagaacacttggaaaaggaactcagagagccgtatcttccaagctgggaggcctggcttccccacttgttcctcccagtaccgtggaggcagcgtgggaaatgctcatctgctgttattctgggcaagaggggagtgaggtcccttggaagcaaacacgagcttcttagttatctttctaccatcatcctttcagtaccagcacaatttttcctcctcttcttttcagatttgctggtatgacagtcagatttctcccatggatgttggccagaaaattccctggtctctcaatgccaggaaaagatgctgacctcacttctctcccaaacggagagcttggccaaagaggttaaatcacaacagccccaaatgattttttaagtgaaaatagattgtctaattttcccacccaaaagccttgcctgggtcacccctagagctaagcttatggggataattcatctgtaacatttttaattacatcgatcctgtcactaaaattgtgctaacattttttattacatggaaaaatacttgtcaacaatattagtagtgaaaaaacataaaaattatataaaatactctctcaactttttcacttatttttgcataagaactgtccgatctttttctgttctctgcatcactctatatatttctatttttcccaaataaatagaagttttctcataaaacgtgtaatttttaacaatctaatggaatttttagtataaaaagaaagaaatacattttaaagctgaatttaaacatgcagagaaaattgttgggaagcaaatttctaattagaataaacaaccactgcactaaaaacaaaattcctcaattgaactttctcttgtccctaaaattacatccttcagcatgaactaggggactaggcagaatcagaagcctggaaaaccaccactcctctcgccactcactctctctgtggccttgggtaataacctaatcaaatatcaatttcactgataagaatctgccaactgttctaataaaaaaaacaagcaaaacataggtgtggggggcttaaatttaattattgattctctgcacatgtagacctacacttccattaactttcgcttggacacctgaaagaaaaagcagaaccaaagtagtttcaaaaaggactctccccaaggcactttttaccagcccaccataaattccaccattaaagacttctgtctctgtgttgattatttctcctcttgtaaaagacgcacacataatgttgtggtaagtcaacggttttcttaatgggcctcatgcagtcttgtggggcaaggttgggggtaaactcaaagtaaaaaggatggaattgagtgattagacctcaaaggatggagctccttggagtgtaggaagggagatgggctatgtagagggtgctgatgcaaaacaggagatgggggatttggaaccaatcatcagagagaacaaaataataattttggataaactgtgaccttactattagagttgcctggtgatcagccagatttggtaaaataatttatatcagccaagatccccaaaagatatagagagtccactcagttggaattgaagaaatttaacagaggctacttacaaaggtgggggtgccagacaaggtccagtcagagaaagaaactacatgagtaactgaagcaggggaagctgatacaaagaattgttaactagaaagagtgactttcttcacaaagaagtaaaataagtctcaagggttctgaaagaaaatgcagaaagcagctgccacctgttgcctgagagaaagtgaacaaagaggcagcttaaagagggcctgtgatatagactgaattgtgtccctcaaaattcatatattgaagcttcaacccccaatgtgactgtatttgaagacaaggccattatggaggtaattaaggtaaattaagggcatgagagtggggccctgatctgatgggattagtgtccttgtaagaagatgcactggcactcatcctcccaccatgcacctgcactgagaaaaggccatgtgagcacagagagaaggcagccgtctgtgaccccaagggagagccctcactggatactcacactgcaggcattgagagcttggatttccagtttctagaaacatgagaaaataaatttcttttgttgaagccctgcagtctatgtcattttgtcagagcagccttagcagaataatccagcctctcgaagctgagattcagatatttttgaagagatcctggccaccaccacatgcagcctgcagcagagggagcgagctgaagctggtcataggacagcccaccaggtgacagaaaaacttttcagaaagtgctggtccaaactaagagcccagtggcttgtagaaaaacttgctagaggctgtgggtgggccaaagctggtccctagaagactgctgaagagaatgtcttcatgcctcccacattcccattcactgtgtcaaaaatatgcatggccatgaagtgttctttaatgctctctattaataaagtttcatactgaatgagctggcaaaggagaattgtttgcacgttttatgttcagtgctacagaactgcacgtttgggctgagaggcaataaattgataactgacagagggaaaaacaaggcacattgaggaaccgtgagactagcaacagttgtaagacctataactcaggtttcaagccaaggtagaagaaacaatgttactcaagtttggtaattaatagagccacagagctgcagtcataaagagataaagccctgacagatattatagtgtgcaaaatccctctctccctccactctctaatctgttcctgaattatcctgtctaaattcacctggaagcaagagggaaatggagctaggtgatgctacctataagcattttagcttgggctccccaaccatcagatcttgagacgagtctgtgagtacaaataattcaattgggagaagatgaagggaaggaacagaatagtgagatatagaagggaaggaagcaaataaaaggtacaatattaagcaaggaaaaattataagcaaataaaatttccaagccaactctgggagacagtgtagaccattgccccaagagggtttagttattatttattcatatttatttatttttgagatagggtatcactttgtcacccagcctggagtgaaatggtgtgatcaaagcttactgaaacctcaaactcctgggttctaggaattcttccacctcagctttctaaataactataactacaggtatgcaacaccataccctgctaatgtttgtacttgtttgtagagacaaggtctctctatgtttcccaggctggtcttgaactacttccctcaggcaatcctcctgcctcccaaagcattgggattacaggggtgagaaaccatacctagccaggttgatttatttatctatcaactttcattggtcattagttgaaaatctccccccaaaaagaaaccagtgaaatttctcaggagcaaaaaccaaggctaaaatataatggtataacatcttcaaactgtgagaaaaaaattattgttaacctggaattctatacccagctgaagtatgattcatatgtaaggacaaaatacttttcagattaaaacaaattaggagtttttatttatgtgcagggtctcaaagaatgaactgtcagactatttccttcaagtaataggaaataaaacctgaaagaaaaaaataagtgtaagggacaaatataaaaaaaaaattggcaaatagatggacaaatgtaaatgtgtgtgtatgttgtgtgtgtatgtgttgtgtgtgtgtgtgcatgtgtctaacacatcataggaaaactgccaaacattggaaacaaggagaaaaatattaaaagcaataaagagtgcattgcatataagagaatgtatataagatataatattgcatatgtgtactacatattgtttatatatacctacatacatatgtagatacatataaacacacatgtattatgtggtaataatgaaatattattagcttttaacaagttagctagaactgaaacactggtgaacaataacataaagtatggtgggaataggccagagataaagttttctaaattttttaaccatttaagttgaagatgaaaatacttattaattttagactccatcatcaagtatgcatgattaatgttctttaaagaagcaaatagaagttttatttatatttttaacatggaatagggcttgttattttattttaaatttaaaaagaagtacatatttatcatctgcaattgttgttttgaagtatgtatacattatgaaatggctaaatcaagctaattaacatatacattacctcacatactgatcattccttctgttgtgagagcacttaaaatctatttcttagcaattttcaagaatatagtaagtttttactaactaaaatcaccatgttgtatgatagatctctttgtcttattcctctggtctaactaaaattttgtatcctttgatcaacatctctccaacctactccccatacacgcctaccaactctagccccaaatcactattctattctctacttctatgagttcaactattttagattccacatataagttagatcatgtggtacctgtctttctgtgcctggcttattctctaaacgtagtgtagtcaaaatttatccatgtccaaaattttcttctttttaaggctctttttaaagaccaaatagtatttcagacacacgcctacacaacacacacacacacacacacacacacagaggaacttcaaaaaattagtgaaaaattaaattaaaggataaaaattaaaaatataaactttgtttctcaatgtaagctccatcaagttcaattaactttgtaattgatgacatcagccattaagtcaatttctaaagaactgaaggtcctggaaatttaatcatgtcagtgcagtctttttcacattattgacagaaaataagtgggttctctttacagatctttttaacattaagaagcaaacagaagtcagaaggagccaaatcagcactttcagatggatgtgtaatgattttccatcaaaactccccccacagtgttcttgccaatgagagaaatgagcaggagcattgttgtggtggagaaggattctggtgaagttttctttggcatttttctgctaaagctttggttaacttttttgaaacactctcataacaagcagatattattgctctttagtcctccagcaactcaacaagcaaaatgccttgaggataccaggaaactgttgccatgacccttgctcttggctgtctgattctgtttggactggaccacttccacctcttggtagccattgctttgattgtgctttgtcttcaggatcatactcattaagacatgcttcatctccgggtacaatactttgaaaaaatgcttcagaatttttatcccccttgtttatatgtttcattgaaaactctgctcttgtctgcagctgacctgggcacaacagttttagcacatatcaagtagaaagtttgctcaactcactgggtgtggtggctcacggcagtaattccactttgggagaccaaagtgggcaggtcacaaggtcaggagtttgagaccagcctggccaacatggtgaaatcctgtctctactaaaaatacaagagttagctgtgtgtggtggtgggtgcctgtaatcccagctactcgggaggctgaggcaggagaatcacatgaacccaagaggcagctcagctttaacttttcagagagaattgtgtaggctgaaccgaatgagatctctatggcactggctattgtttgtgttgttaattgttggttctcttcaattatggcataaacaatatgaattttttttattattgcttacgtacgcaaattgatgtggatagtctgctgttgcatactttatcttcaacatgtctcatcccttcttaaaacaaggtatccatttgaaaagtactaattttgggggggcattgtccccatgaactttttgtaaatcacctatggtttcatccttctttgacccaaacttaaccataaatgtaatttttttgcttcaattttaacagacttcatgttgctcagataggggctcttttcaaactcatgccttattcttctactaagtgttgttcacacatattaggtatgagtttattttgttgcaaaaaaatattttgaaatccatacatgattgttttttcatagtaatcattttccatgagcttattgaagagcccttgtgtgtctgtatgtatatcacattttctttatctattcatccactgatagacacttaggttgatttcacattttgactgttgtgaataatgctttgataaatatgagaatgcagatatgtcttcaacatactgatttcatcttctttgaatgtacacccattagtgagattgctgcatcataccgtggttctattttaacttttgagaaacctccacactgttttccataatggctgcaccaatttacatgctcaccaacagtgtgcaaggggtccctttcacacatccttgttaacacttgttactttccctctttttgataatagctcttctaacaggtagggggtgatatctcattgtgggtttaatttgcatttctctgatgattagtgacattgaacatttttaaatatacctcttggccaagtgtatgtcttcttttgagaaatgtctattcataggcttttctcatttttaatctggttatgttcttactattgaggtgtttcaggtcttatatattttggatattagccacttatcagttgtacggtttgtaaatatttttcttccattctgcaggttgtctcttcactatattgattttttattggttatgcagaagatttttagtgtgatttaatcaaatttgtctatgtttttattgttgtctgtgcttttttgttcatagccaaaataccattgcccaggccaatgtcaagaagctttttcctatgttttcttcaagtagttttacagtttcaggtcttacttttaagtctttaatctattttagttgatttttatgtatggtgtgaaataagagtttaatttcattcttctacatatagacatccagttttactaacatcatttatttaagagactggcctttctacattgtgtgtttctgacacctttgtcaaaatcaattgacagtaaatgtatggctttatttctcagctgtttattcagtctcactggtttatgtgtctgtttttaatgccattaccatgctatttagattactataggtatgtagtatattttgaaatcaggtaatgtgaagcctctggcttgttctttttgcccaagatttctttgttcatttggatcttttgtgatttcacatgaattttagaatggtcttttccatttgataaactcttaagcataattactaaaaattttcatggaacacatagtttcctcttgataaaaaaatagaataagtaaaattataatgacatttgtataccatttactgattctttttgttctcattgtttgtgtaaaccttgaaaagtaaggaattaaaaagaacgttttttctttaagcataatttatttaaatcatatttcggattttgctgatttggtaggtgctagctggggttaatggaggccacaaggaggtttccttaggtattttgcacttctttccagcaagacaaagaaagtaatatgactgaaaaaaaataaagataaatgtaacaaagtatctgaggaaagcaacccgaactttttatgttatctatttcccctaaatgaaatatgaagcactgttgaccttttaccctgaatgagccaaacttgtagcagaaacgggagcttggctgttgtctgtgcattaaaacctttctctcatttactatttccaggtaacaaactagaagagcgtcacagcttgtccagagagaaagctgagcccattgtcaaaatcagtactgcagcctttgctgactgtgactatttaacatctcaacacactgggggattaattacttgaacatttgggggaataacaacaacttgaaactcatattttaacctgtatgtcatgaatattaacaaagacaaatttataactgacttgactattttgtgtgtttttgcttttaagaaacagttggcttctgtaggaatgaacaataagaaataacaaaatttatttgttagtaaattttcctccagtgaatatgcatgcaccagactcactgcagcaaactcagtcgtctttgaaggataaaacacagaaaaccattttgttgtacaatgagatgagttatttgaacttaagacatgtttttttttcataagtttttatgaactaggtatcgcatgtcccataaggggtaatagatgtgttttctttgctctgctcagcacagatttgaaccatttctccaactccagggggctcagcctcatgctcaccttcaaaatcacaacaaggcctcctctacaccttttgcagctatggttaatacccagtgagttcagcctctgtgggctttctgcacctgcacatatgtacctccgtgttttgttatctcttggtggatactggaattgtaccctgggctgtacagcatcaagttgcatttaaatcagagagctggcatatctcactcaccacagcaggtctgcgtcagctgaatcttgcaaagcgtgtcttatcttccagagcataaatcagtaagggactgcaaagctgctatgggatcttctccctccctgtggaaaggaacacagtccaggaatgccctcaaatggacaaaccactctcttcatatcatttgttgtcttcattctatttctaattcaaagacagctgaaagccacagacaatagcagaatccctgcatggttggtggtcctggaagaagactggagagagaggtggagtggatctcaaggcaacaattagttagagctcctgctctttgattgcttgagaactcagaaaaggatgactaaggtcacttaggtgtagctaaaagggctttagagtcttaggaaaatgagaactctgaggagcctacacaccagtcactaagctggcactaagggtgtttgatcagggaagggtcactgcttgtttgagatggacaaccatggctctgacccattggctgacccctgaggagcctgtggggctccctagaaacaacccagaagtggcttcatccagaacaaagaggaagtttctaaaaggtgtagacatactcagagacaaagctggctcttgcctgagtgacaaagacattgagcttgcaggggtcccaccacaaggtaggtagaagcagagtccgatggttctgatcccacagaccattcattatccagtgttcactgcatttctactccacaaccagcaagctctagggaacatgttttttaaaaattaaagcagaccttgttgatgttatagtttttttggaggaaaaaaattgacttatgatatataatgtaatattatatataatatattatataattatatattataatttgtattagatattataaaatcaagagagtatgtaatcaaggcactaatacatggaacaggaagacagtatagagtgttggaagggggcagtcaatacgaatgaagcactgatcacttagagacgagaacagccctgagagcacaagcgtgacttcactgccttctgttccccagcacctgcctctggcctgtgccctagaaaggacaccaatatattgcagttaaacatattaaatgtggtgagatttggactgaatcttggagattaaatttcatacaagaaaaaacagcattattagaagtctatgaaaaaaatagaatgtttctctaaaaactgacaaagtgtaagagctaaaagagatcaggaatgtcccttttaacccacctgaccctcccctggactgttaattccttaccccattcagtgcccagcattcaataaatatctgcttattatttatgctctcttattccacaccggtaggttagcaaacatataatcaattcattttggataagagcctttctcaaattgattatatatttccttcttacacagagtaagctgaacatagtttaaacttttttgttggatgttgtccaacatgttcattgaacaaataaagaaactaaaacttggaaaggggaagagctcgccaatgtgtcacggcccttgagggttggcactgggttcaagctcagtgtcaatgttgttttcacactggagacaatctcttattttcaccagacgggcctttgtgaaacacatgaaggaaccctcagaagaccacttcagagacccccccatgaccacagtggagagagtcaagagaagttcattcaaggaggggctggtaaagtagcaggagctgggccatgcagggactcacaggccgcacctaggggtttacactcatcctaaccgaggcagaaaaccaccgcagagtgctgaggatggtgaaggcatgaggatgagttggaagaagtgagtttggctctgctctggagaatggctgaaagggtagtgggaacaaacggaggcagccaccgaggaggccatcgcaggtgcaggtgggatgcaaaggggagtgggcacaggcttggagaacagggatgcgtgggagtgcaaggcagtcaggtgggaaaaggcagtaaatacgagtggcttctccagaatgtaagctctttccccttctccaaatcatccagagcaaaggccagactcttggccacagtgtaaaaggcctctgggaatcacacccaggcttccactccacaccacaccatgccccaacacgcctccataaaacttgattctccttctacctggagctcttctacccactttctacctttgcccaaacaagctcagtttacctctcaggtctcaagatcgatgctaccacccctggaaagtcttcctcgatgctcccacccacccctttccatcggccacattcccatgacatgggttctttctctacctccactgaggcacagctctgcattataactgcctgatcacccacctgaccctcccctggactgtgaattcattgccccattcagtgcccagcattcaataaacatgtgcttattatttatgctgtcttattccacaccggtaggttagcaaacgtataatcaattctttttggataagagcctttctcaaattgattatacatttccttcctacacagagtaagctgaacatagtttaaccttgaacacaaggtcatcattatgaatgcagtcacaattaaagaatatcagacattagatagtctatcccatgcattttttagatgggtaaattgagacccagagaggtggagggaccatggtttgaggtggtaaatctatgatttgaatcttagcaccctgacttctagtctagccctgaagaaagctgcatccgaggagccatggtcaaattctctgggtatttaagatgcctagactctttgctccagcaccacagggctccaattgttgtattttattttagttattgtgcctgttttcatagctcttctgcctcctcccatgttatcaactcacttcttaatccttcagtctatccaaatcaaacaaactctatttgttttgttttgttttgtttttaagggacaagatctcattatgtcactcaggctgtagtgtagcggcacaattctggctcactgcaaccttgaactcctggcctcaagtgatctttcagcctcagtctcccgaggagctggaactacagacggaacgtaccatcaggcctagctaatttttcattttttatttttattttttttatagagacagggtttcaccatgttgcccaggctggtcttaaattcctggcctcaagtgatcctcccactttggccacctaaagtgatgagattacaggctttaaccactgcacctggtccctatctttattcgtatgtgtttgggaggcagataacagttttacctccccaaagcaccacagtgcttattattatctatgaacattgatgccttactacccagtctcctccactaaactaaaattccaggtccattttattgtcctctctgcacctggtgcctagcacagagcccagcatattcacatgtgctgaagaattatctagcttcttaagcatcatataaaataagcattattagtcatagaaaaagtataagctccaattcactggtttagcgatgcctattttcctaggtttcttttctgattcctagatgtgattgacagagcttagttctactaagcatgctgtatttagatgaagtaagaagtgactggcatttgtggagggactgtgtccttttttgcagtaattagaggttgttggcacatccagtctttgagactgttttccttacggctcccttttcgtagacagttgcagcatgagaagctgaaggaattttatgaagtagacattggagcctcccagtgattgccccttcggggttttgcagcaggcatatgctatttgcttggtccagagtgaagcgcctctacttttctggagaactgttccttcccagctacaataaggaggctcaaggcagagcgggtgtcattcatttgtttaatgtagttgctgtcttggtatccatttttagtcctaataaaagttatttgaaacccggttgtaccatgtgtcactttgggcctaattaaaacttcccctacccatggggttgtttgcagcataacccacttgttcctcatcccactgaccaaaaatctaacacacccacagctactgaccatgagaaaaccaatgatcaacaccagagtcatggaaatgagctccccttcacgcatgatttctttaaaggagccaacctgcagcttccctgcaggagagtctgaaaaactcccaggaatttaacaaaggcagagtctcacaggcctcaggcctctctcttccctgctgtctgagcttcctgcctcctccagacctcctgctgtcctctcagcaacacctcgaacctctctgtgacttataagtaatgaattccttctgtttcaggcattttggtttcacctcctcagtgtgtttcatctgacagacacacccaggcccaacatccccctggtcagagtgctcctacagatggctctcttggcttatggtcactcttaagagggtaagaccctcttaccctcttaagagttatgtgatttgtatcattatggtttcctgtttgtaaaaaaaaaaaaaaaaaaacaggaaaccataatgatacaaatcgcaacagcaggatcacactgcctggctaaaggcaattgctttgcagtgaacacgtaacttaagccatgtcaattaaggtttttccctggaacttttggaaataaagccatggaaagagattcttgcaaggtaagggtggcaaccatgttttcctccatgaaagcaaaaatgaacaacttaaaacaacgaagttgagatgcagagaggagtagagatgagagggcatggtgactgagctcaagtccctaggggtccagcaccaccattccccgccgtggaatctgactgcaacacctctaagtcacaggaatgccactctgctgcacctagcatctgcaaccagaggattcctcagtgcagaaaacacaggagatttagagaagcccatggaggacagacctctgatatataattagagaaaagccaatggtttagagctcattcctcatctgggaaatctgttgccatgaaccaaaaccaaaatgagctttagggagtgattttatgggttaaatcccagagtctgaaacaaggaagcgagcagccccctcccctgctgccctcttcaaagcctcctgtgtcacagctctcaggctaagcctctgtgctgaaacattacaccatttcagagagtaaatctggctctagagcagggtctcagcccagcataggaagtgtttcctaaaaagcacagcttccctctaggggctactttataaggagataagcctcctgcagtgtatggggagtactccaggagagttgtcgggatatgggggaatcacagaggaaatgctaaacaaattgtttgtgatttgctttgctagttctgctcacttccaagagtctgtgattcttggcttcagtcacaagggcaagtcagttgggcaaattcaaaacaaatgtcaaaaccattatctggtgagggagttggtgatttctcttctgctcttaatgaaacctccaccctgttttcctgaaggtacagttcgtcccatccttccctccccttccctggctggaagaggcagcctccctcctcccattgcccaggaggtactctgccaatatcagcaacccccactgtcatttctgtgcaaatcccctatcatcccagtaatctggccagccctacacatcagtcagccttgtatagctcgggttcaccagggagcaggctctagagctctggatgaacacctgcctatgtcttggctctgaaacttgcacctgctctataagtagatgaccccgcccctgcagacatgggtctgtgtgcggctgacatgcacaacctggaaagccatggaggccctgccttagtcactaaggctgagggcaagggttcctataatcccaggacaaaccttgtaggtatccagtgggataacctgtaagtatttcagcttctcccatctgcagctattaacccttgaagtgcaacagtaaatggaggaaatcggccaggaaagaggagaccacagtgtggattcttgaaggccttcacgtggggagggatacaaggctctaataacatgcatcagatgtggatactgatcattcacactacagattatttccatcagtacttcttttttgatgccagaaattacatttggagcctggctgagactctgatgtgccagtctttataaatgttgatgttcagtcagaatggctattattaaaaagtcaaaaaaacaacagatgctggtgaagctgcagagaaaagggaacacttatataccattgtggggacgtaaattagttcagtcactgtggaaagcagtttggagattcctcgaagaagtaaaaatggaacaaccattggacccagcaatcccattactgggtatctacccgaaggaaactaaattattctaccgaaaagacacatacactcatatgttcattgcagcacaattcacaataacaaagacatggaatcaagttgggtgtccaccagtgttgaatgggataaagaaaatgtggtaaaagatgaaaatgtggtatcctctgtgaccataaaataaaacggtactaatttaaaagtcaatagactaatttagaagtcagtagatgccatgagtccccattcatccctgtgctgaaaattatgacttcattcctctctcttgcattctgcattctacttcttctttttcttcttttgtttttgagaggatcagtgtaatctttattaaatttatttttaattattatgggtacataatagtagcatatgtttataaagtacatgtgatgttttgatacaggcacacattgtgtaatgatcaacttagagcaatcggagcaaacaccacctcaagcctttatcatttctttgtgttaggaacattccaattccactgttctagttattttaaaatatgcaataaattattgctaactatagtcaccctgttgtgctactgaatattgaatcttgtacattctctttaactgtatttttgaatccattaactttccctttttttgttgttttttgtttgtttgtttgtttgtttttgagacagtctcactctgtcgcccaggctggagtgcagtgtcacgatcttggctcactgcaaactctgcctcccaggttcaagcgattctcctacctcatcctcctgggtagctgagattacaggtgttcaccaccacgcccagctaatttttactatttttagtaaagacatggtttcaccatgttggtcaggctggtctcaaatgatcctcccacctcatctcccaaagtgctgtgattacatgcatgagtcatcgcgcccggcctaaccttcccctctttatccttcccccacttcccagcctctggcaaccatcatttcactctctgtcttcataagtgcaatttttttttcagctccttcaaatggtgagaacctatgatattttcctttctgtttctggcttattttatttaacagaatatcccccaattccatctatgttgttgcaaatgacagagtttcattctctcttggctggataatattccactgtttctatgccccgcattcccttcatccattcaactgcagacgtgctccacttgctctgagtcatcctccctgtgtcacctcccgtgtgcttcagaatagatgttgttggctccacgtcctcattctacccacgtcagctgtccctgctgacagcaagtttctgccggggtgccccacatgtctaagcccctgtgttggctcggggtctcagggtttaatgacatgtgcttaggttgccaatggccagtggaagcagagcccagacacgcctcaggatcttctccagtgcctgcatccacattgccagagacagctcaccccagccaccatgaccagtgcagagctccccacgcctcagcatctagcatccaggcccaactgctccaaccaggccaagtatgggtctcctccctgacacctacttttcatggcagaacacctacttttcacgggaggaactctcgtctctctctctcatcaggctgtgataacgcctcatggccccagaagtccaaagtctggttgttgtagcatggatatgggtttgctctaaatctctggttaaaatgtgacctccaatgttggaggtggggcctggtgggaggtgtttgagtcatgggggtggatctttcatgagtggcttggtgccctccctaaagtaatgagtgagttctcactctatgtgttcatgaaacagctgatttcttagaggagcctggcacctcctccagctctcttgctgcctctctcaccatgtgacatgcctgttcctcctccaccttctgccatgagtaaaagcttcctgcaccctcaccagaagctgagcagatgctggtgccatgattattgtacagtttgcagaaccatgagccaaataaacctcctttctttataaattacccagtctcaagtatttgtttagcaacacaaaatacactaatacactgggtaacttcatagtcagcagatgaccacccttttgtctcattccctctcttcccaatcattccagatacttttacatctgtccttcaaaccatggctggagtactgtgggactcaaaatcgataaataattaatagattctaaattctgtgtgaaaagagagctaataactagcataatcttaggaacatgctagaaatggccctagcagagatggggcagagggcagtatgtttttgaagggagtgaaggggaagacagccagagcagtgcatgagggaacccccaggacaggggtcaggacaatgggagagaggggagccatgaagggcacactttgctttctccactcctgagggctatctctgaattttgctctccatttagctgagagtgtgaaattgagaattcataaaatcacttttattcctttaaatggcccttatgaaaagctttcaagagtcatctctaaatgtacttttcagttgcattttcatgaacaatattcaaggtcagaatgagcaaatgtctagttagccattggagaaaggaccagtagcacacagatatttccagcattctagagacatgtaaagtacccttggaagagccggcatttaacttgttgaacattaaatgccattaatgctcagctgcacagaaatttccatttctgaatattcttctccaaatttctcccttgaaccatattattttagttcagcctcaattataccatcaaaattccaccattcataaatgtattaccattctgaaaatgtacttgatggcatctttataccatgctgtggaaaaatgtgtagcaataaaaaaagataaatcacaaggttttttttttttttggagccaattagccaaacaaaacttaaatataaatcaagcttggtagaaaccacaggtcatgctcaagtttatgaattcgttatagagcagcactgccttgaattcaaccttgcctagctttggtcttgaccacagcatcacaagagtggtaataatatcagtaggtttactgacatgcacaagcatattcccaggttgcagtgcaggacccgaggtagagccgagactccccaaaaaggcagttcagaggtaggcacgcccagtgggtctgcatcagagcccctgcgtctggttcagggactgagatgagtttctcggcttccctgagatgtaatatttttacctatcaaatcaaaattactgtaacttctgcctcactgattgtttttgttagaattcaataaagaaatgtctcaaagcagtcacacggtacctgatacggtgaacactccatatgttgttctttattatatatacacacactaagttatatacataaatacattaaaaattaatttatatttttcataactataatttatatttattcataactataatcacataattcaattatatgtaatagataattttatagttatataatgtgtgtgtgtgtgtgtgtgtgtgtgtgtttgtttaaaatgtccttggaaaacagaagcaggtagagatgggaggagacaggcattgttcttcgggctgggctggcatccagggggcctctctggccagccaattgcacatcttctgagcaagggagagggaacatggaccagagaacagccattggaagagaaaagcagaaaagaaattattttcagttttcccgaatttctttccaaagtcatttcaaagactaggagtgaaggctgaggctgggtctgggacccccaaacttcccagccactctgtgacaaaggcaggttcgagacgattattccctctgcacaaacaaggaaacttagggtgaaggaggagctcaggaggagttagcagggaaacctggcacagaccaaggccctctaatgcccacagtgtgccgcacgattggccctcaccccacacccctgaggctccgttttcaccccatgtcctatagctagccctgctggcttccctgtggtttccatactccaggtaagctcaggcagtggggcttttgctcctgttgtcccctctgtggaaactctcttttttcagagagccccacagcttactccctcatgtgggttggttctgtgtcccacccagatctcattttgaattgtaatcctcacatgttgagggagggacctggtagaaggtgattggatcatgggggtcatttcccccatgctgttcttgtgatagtgagggagttctaacaagatctgatggtttaaaagtgtttggcagttccccgcttactctttctctcttgccaccatgtgaggaaggtatttgcttccccttcaccttcctccatgattgtaagtttcctgaggcctccttagccatgtagaacagtgagtcaattagactttttctcttcattaattactgtctcaggtagttccttataacagtgtgaaaacagactaatgcactccccaccttcatccaggtgtttgcttcaatgtaactctatgtgagaggccttcctggcccatatcatctgaatagcacccccattattttctatctccaatactgttttctttttctctcttttcaccacccaactcataataaggtgattgtctacaccacccatccacaccaactgtaatgtaagttctaggagggaaggaacattattttattctttgctatattcggtgcatggaacagtgcctggcattaataaaaatattttgggtgtaaaaactctaggcttagaagcctgatcctaaaatctgttctgcctaagttctgtgtactctatcagagacctgaacattggtgggtacctggctgctatggccagccaaccatatgttttataccagtgaatgtggtgtctggaaaatgggttgagctcttttctctttttcatttatcttgggcattgcaagactttgatctactggattcaacaaaagaacactttgaccctatgtttataagtaaaaatgctttggtcaaaattattccaactctggtgaaatttaatttgaaagcattttccaaaaccaattccacaagccattttgatttgttagtgctcagttaatgttatcaggtatttggctgaaaccacctatataacagttaacataggaccacagagtaaaagttgcaggcatagttaaaagttaaccagccattgtttctaagctcatcccataattgcttactgcccagaagccatgtagccagtggtcacaagggctgtaacttctcctaattgctcttatagatagcatcattgttgaaaacaaatgcttagtgctacaaagaagaaccagcactgagacaaaggatctctcagcaaggcaaattttcttctgcagaagggtgcttctcccatgtggagcaatggaaagagcacaaagaacaaaacagagcaggggtttttattatctcttaacgctgcttgtcactgttactgtgtctgcctccattggctagagttgtaccacacagtctaagctgaacctggttggttaacttgaaaaatgcagaaatgtagttacatcagcagtgggaagacaagaagatcagtttcagtgggagaagtcattgcattgggaggggtaattcacagagtgggtagcagatgtggaatgtgggctctatagataaggactggcaggaatgttgtttaccagggctgggggaatatagagagtaaggaagtctggccttgaaatcagggaacaaaggacaagaaaacttaaacaagctaaacctttgaagaagaatttcttactgtagtcaatgatcattattgtaaaacctatgactgttcttcaaaatatttttcagacttgtcaaccactgtaccaaatggcactgactggaccaagggcccattccaagaaattgattcaacaggctgacacccctgcccaacccagaaactggattagtgcaagacaatcaatactctacacccctatgagttcatccctagccaatcagcagctctaattccctagacccctgcccaccaaactaccttaataatcccagcctctaagttcttaggaaggtagatttgagagatttctcctgtcctccttgcttggctctcttgcaattattaaactctttccctgctgtaacacctactgtctcagtgtattgtttttctctgggcagtgggcaagaagaatccaccaggctgtacattgtaaccaccctttcccttgccccttaggcctcaggacagcagtgttcctcactgttgctagctcaggggttctatgccatcttttgttaattttatttaagcctactcacacttttgtaaatagttctttccttaaaccctcttcaattacctagtttgcatgtgttaaccacttcttgcctgctggtcccagacttatatagttcatttatttataatcagtgaagatactttcctgcttccacataaaaccctaggcagtgacttttctgttcattcttaggggaaaacaaaaaacaaaaaaactatgggcagtttgagttaaaaactaagtcaaatttggagggaggagccaagatggccaaagaggaacagctccggtctacaggtcccagcgtgagtgaggcagaagatgggtgatttctgcatttccatctgagggaccgggttcatctcactacggagtgccagacagtgggtgcaggtcagtgggtgcatgcaccgtgcgcaagccaaagcagggtgagggattgcctcacttgggaagcgcaaggggtcagggagttcgctctcctagtcaaagaaagtggtgacagagggcacctggaaaatcgggtcactcccacctgaatactgagcttttccgaccggcttaaaaaacggcacaccaggagattatatcctgcacctggctcagagggtcctatgcccacggagtctcgctgattgctagcacagcagtctgagatcaaactgcaaggcggcagtgaggctgggggaagggcgcctgccatttcccaggcttgattaggtaaacaaagcagccgagaatctccaactgggtggagcccaccacagctcaaggaggcctgcctgcctctgtaggctccacctcgggggcagggcacagagaaacaaaaagacagcagtaacctctgcagacttaaatgtccctgtctgacagctgtgaagagagcagtgattctcccagcacacagctggagatctgagaacgggcagactgcctcctcaagtgggtccgtgacccctgacccccgagcagcctaactgggaggcaccccccagcagaggcagactgacacctcacacagccaggtactccaacagacctgcagctgaggtcctgtctgttagaaggaaaactaacaaacagaaaggacatccacaccaaaaacccatctgtacatcaccatcatcaaggaccgaaagttgataaaaccaaaaagatggggaaaaaacagcagaaaaactggaaactctaaaaagcagagagcctctcctcctccaaagcaacgcagttcctcaccagcaacggaacaaagctggacggagaatgactttgacgagctgagagaagaaggcttcagatgatcaaattactctgagctacgggaggaaattcaaaccaaaggcaaagaagttgataactttgaaaaaaatttagaagaatatacaactagaataactaatacagagaagtgcttcaaggagttgatggagctgaaaaccaaggctcgagaactaagtgaagaatgcagaagcctcaggagccgatgcaatcaactggaagaaaaggtatcagcgatggaagatgaaatgaatgaaatgaagcaagaagggaagtttagagaaaaaagaataaaaagaaacaagcaaagcctccaagaaatatgggactatgtgaaaagaccaaatctacatctgattggtgtacctgaaagtgacggggagaatggaaccaagttggaaaacactctgcaggatattatccaggagaacttccccaatctagcaaggcaagccaacattcagattcaggaaatacagagaatgccacaaagatactcctggagaagagcaactccaaggcacataattgtcagattcaccaaattgcagatgaaggaaaaaatgttaagggcagccagagagaaaggttgggttaccctcaaagggaagtccatcagactaacagcagatctctcagcagaaactctacaagccagaagagagtgggggccaatattcaacattcttaaagaaaagaattttcaacccaggatttcatatccagccaaactaagcttcataagtgaaggagaaataaaatactttacagacaagcaaatgctgagagattttgtcaccaccaggcctgccttaaaagagctcctgaaggaagtgctaaacacagaaaggaacaaccggtaccagccactgcaaaatcatgccaaaatgtaaagaccatcgagactaggaagaaactgcatcaactaacgagcaaaataaccagctaacatcataatgacaggatcaaattcacacataaaaatattaactttaaatgtaaatggactaaatactccaattaaaagacacagactggcaaattagataaagagtcaagacccatcagtgtgctgtattcaggaaacccatctcatgtgcagagacacacataggctcaaaataaagggatggaggaagatctaccaagcaagtggaaaacaaaaaaaggcaggggttgcaatcctagtctctgataaagcagactttaagccaacaaagatcaaaagagacaaagaaggccattacttaatagtaaagggatcaattcaaaaagaagagctaactatcctaaatatatatgcacccaatacaggagcacctggattcataaagcaagtcctgagtgacctacaaagagacttagactcccacacattaataatgggagacttcaaggagaactacaaccactgtcaacattagacagatcaacaagacagaaagacaacaaggatacccaggaattgaactcagctctgcaccaagcggacctaatagacatctacagaactctccaccccaaatcaacagaatatacatttttttcagcaccacaccacacctattccaaaattgaccacatagttggaagtaaagctctcctcagcaaatgtaaaagaacagaagttataacaaactatctctcagaccacagtgcaatcaaactagaactcaggattaagaatctcactcaaaaccactcaactacatggaaactgaacaacctgctcctgaatgactactgggtacataatgaaatgaaggcagaaataaagatgttctttgaaaccaacgagaacaaagacacaacataccagaatctctgggacgcattcaaagcagaatgtagagggaaatttatagcactaaatgcccacaagagaaagcaggaaagatccaaaattgacaacctaacatcacaattaaaagaactagaaaagcaagagcaaacacattcaaaagctagcagaaggcaagaaataactaaaatcagagcagaactgcaggaaatagggacacaaaaaacccttcaaaaaattaacgaatccaggagctggttttttgaaaggatcagcaaaattgatagaccactagcaagtctaataaagaaaaaaagagagaagaatcaaatagatgcaataaaaaatgataaaggggatatcaccaccgatcccacagaaatacaaactaccatcagagaatactacaaacacctctacgcaaataaactggaaaatctagaagaaatggataaattcctcaacacatacactctcccaagactaaaccaggaagaagttgaatctctgaatagaccaataacaggagctgaaattgtggcaataatcagtagcttaccaactaaaaagggtccaggaccagatggattcacagctgaattctaccagaggtacaaggaggaactggtaccattccttctgaaactatttcaatcaataggaaaagagggaatcctccctaactcattttatgaggccagcatcatcctgataccaaagccgggcagagacacaaccaaaaaatagaattttagaccaatatccttgatgaacattgatgcaaaaatcctcaataaaatactggcaaactgaatccagcagcacatcaaaaagcttatccaccatgatcaagtgggcttcatccctgggatgcaaggctggttcaatatacacaattcaataaatgtaatccagcatataaacagaaccaaagacaaaaaccacatgattatctcaatagatgcagaaaaggcctttgacaaaattcaacaacccttcatgctaaaaactctcaataaattaggcattgatgggacgtatctcaaaataataagagctatctatgataaacccacagccaatatcatactgaatgggcaaaaactggaagcattccctttgaaaactggcacaagacagggatgccctctctcaccactcctattcaacatagtgttggaagttctggccagggcaattaggcaggacaaggaaataaaaggtattcaattaggaaaagaagaagtcaaattgtccttgtttgcagacgacatgattgtgtatctagaaaaccccattgtctcagcccaaaatctccttaagctgataagcaacttcagcaaagtctcaggatacaaaatcaatgtacaaaaatcacaagcattcttttacaccaacaacagacaaacagaaagccaaatcatgagtgaacccccattcacaatcgcttcaaagagaataaaatacctaggaatccaacttacaagggatgtgaaagacctcttcaaggagaactacaaaccagtgctcaaggtaataaaagaggatacaaacaaatggaagaacattccatgctcatgggtaggaagaatcaatatcgtgaaaatggccatactgcccaaggtaatttacagattcaatgccatccccatcaagctaccaatgactttcttcacagaattggaaaaaactactttaaagttcatatggaaccaaaaaagagcacacatcgccaagtcaatcctaagccaaaagagcaaagctggaggcatcaggctacctgacttcaaactatactacaaggctatagtaaccaaaacagcatgctactggtagcaaaatagagatatagatcaatggaacagaagagagccctcagaaataatgccgtatatctacaactatctgatctttgacaaacctgagaaaaacaagcaatggggaaaggatttcctatttaataaatggtgctgggaaaactggctagccatatgtagaaagctgaaactggatccctttcttacaccttatacaaaaataaattcaagatggattaaagacttaaacgttagacctaaaaccataaaaccccagaagaaaacctaccattcaggcattaccattcaggacataagcatgggcaaggacttcatgtctaaaacaccaaaagcaatggcaacaaaagccaaaattgacaaataagatctaattaaactaaagagcttctgcacagcacaagaaactaccatcagagtgaacaggcaacctacaaaatgggagaaaattttcgcaacctactcatctgacaaagggctaatatccagaatctacaatgaactcaaacaaatttacaagaaaaaaacaaacaaccccatcaaaaagtgggtgaaggatatgaacagacacttctcaaaagaagacatttatgcagccaaaaaacacatgaaaaaatgctcaccatcactggccatcagagaaatacaaatcaaaaccacaatgagataccatctcacaccagttagaatggcgatcattaaaaagtcaggaaacaagaggtgctggagaggatgtggacaaacaggaacacttttacactgttggtgggatggtaaactagttcaaccattgtggaagtcagtgtggcaattcctcagggatctagaactagaaataccatttgacccagccatcccattactgggtatatacccaaaggactatagatcatgctgctataaagacacatgcacacgtatgtttattgcggcattattcacaatagtaaagacttggaaccaacccaaatgtccaacaatgatagactgaattaagaaaatgtggcacatatacaccatggaatactatgcagccataaaaaatgatgagttcatgtcctttgtagggacatggatgaaattggaaatcatcattctcagtaaactatcgtaagaccaaaaaaccaaacaccgcatattctcaatcataggtgggaattgaacaatgagaacacatggacacacgaaggggaacatcacactctggggactgttgtggggcagggatgggggagggatatcattgggagatatacctaatgctagatgactagttagtgggtgcagtgcaccagcatggcacatgtatacatatgtaactaacctgcacattgtgcacatgtaccctaaaacttaaagtataataaaaataaataaataaataaataaataaataactaagtcaaatttcattaggtaaaactgcccagtcccaactaataatcaaagctccaaagttacttagcactaaatattttttcccttccatagcaaagcctaaaattgcatactagctacttgcaaggatgggtcagaggaagtcaaaaaaggtgaagaatatgttctttctccatttcattatctagtatttcttctttctctgcaaattgcttattaaattttcaagctctacctgagtcaaagaaggagatgagaagaaaagagataatgataaaaaaaaaaaagtgtgaaacaaaaataacattctaagccccccttactgactgtacagaccctctcttggccaaggggattccaaaaaagcctgaaaaactgagaaaggccttgttgagaagggaagtcagacatgcctcattgtaccacctctctttggagtttagttccaactgaccagcattaacattaaaacagaaatcttaacactgacaaaacagactctttgtagcaataggacagcaagtttcaactggctctggtatagcatcacatgacagataacaggtcctaaaagaaatcaaagcattttatcctgaaacatatgtatttgatgtattttgaaattgccctgcaaagttgtcacttgtggaaaaatttgcattctgtagagaatctccttccctttatgtgtgttttcctgatccaggaggagatgcaactaagagtttgacaccttttaaggttcattaaaaaaagaaacacttaccatctattttctctgaagtctgctagttagaggctttatctacataacaagagccttgcttttatcttccccttaactcaagcatttattttagctaacttcaactctctaggcaaagtttaaatttttcaaccaattgtcaattagaaaatatttgaatccacctgtaaaccactccccaccacaccctgctagaagatgtcccaccttcctggttgaaccaatgtatatatcacatggattgattcatgtctttgcttgtaacttctgtctccctgtaacgtagtaaaccaaggtataacccaatcaccttggccacatgttctcagaacagcttgatgctgtatcctgggcaatggtcacttatatttggctcagtaaaaacctcctcaaatattttatagagtttgtcttttctcatcaacagtggtatttacctgacaagtctgatcctcatccataggaaacattcatgttttttccacctcaacaatgtctggaagaacacatgtccctcatgcagcagcacctcttctccccccactaaagcagctatccaggcatgttttgttctctacacttcccagtgacccccttactataggggcagatatcaaacttttggggatgtgccattaaagtccctttcaccagacaggaggagagacacactttcaagggcttgggaactcatagctatggagaacactaaaagaaggggaatggcaagagatgagggaagaagcaaactctacagcactcacctcttgctgctaacctgctgagtcactgcatgaatcagaaaagcctgcagccaagtttgagagagatatacccaaatcataaccctcttggggctatggcttctgagcagtaagcaatttagaaaggcaagcttagaaacactggctggttaacttttcaccttgcctgcaactttacaggattcaggccttcaccatggcattttctctgttgccctatatgaatttttatataaccctcacaaccttaactgatcaccttcattttttgtcactcttatttgacatatttgacctcaaatgccagtatttaaagcaacattacacatttttcctccaatatcctcattttactgaaattggggctcacagtggcaggatcacagacaggacatgtcaggtaaactgaatgtcccaggccccctgagcttgtgcatcatcagccagattcactcaagaaaaaagaaaccacactagtcctgtaaacagaaggaatctgacatagggagctggttaaacaggcctaggagacggaacaaaaagccaagagggaagagcaagggcacactaagacagcaacttcagggagaaactcttcgctcccaggctgggagcagagggaggaagttgtgcttactaagagcctgcagcttggaggagagatcatcaagctgggagccagcctcatgaggaggaggctggtgttagtgtctccaagggaatgtgatgaggctggttctggcactgcagaaaaacctggaaacaggaacacagcaaccagcttccgtcactggggtgaagaagtattattgggtgatgtgagcagaacaagaaaaaacaaaaaaacaagtcctgtcttcctcacccagctctccagtctccatccagcatcctctattagcagaactaacagagagacccatggcagaagaggaatgtggtttgcaggttccaatcacagcatcatgaagcaaagtataagacatggtttgcagctgggagataacagctcaataactagtaaaacatccagatgaggccaaattaatgttaatgcccaaattttgctaactcatagcacacactgtcaagagagctattttcttcctctgccacattcttgccaagagccatgaaatagaaacttttgacctctcaaaagttttcaaaagtaatcttctggacttttctctactcactaactaattccttcacatcacagcttagcctgcatctgggagcttttcaacccagcatgccctgaagtcacattcatgttctttcctttgtttattgaggagcaaagacctactgcagtccagctgctctgcctgtatctgggtggaaaataagcaagactcaaatccaagcatgttctacgaaccaacttcagcaacaataaagtgataccttgaatctttctcactcttatgtgtatatctcaattcgttcacaacttggagaggaaaagagatgaatgatttctctctgaaacattttatgcaagcttacataaaaatggactgtcacccactgtgatagtccactgtgtcaccaccacccctcctcagcctctctgccacaggtctgcctattatgtctggaaggttctgggatgcacacattctcagtccagtctccaggctgaatgcaacctcccagcagctacctgaggagctcatctcagccttcatgagaacatgcttccttgcccagagctctgcttcccaatgtcccacaaaaattcctgggctccttttagtccctttctaccagagtaatgctgtgtttcaggcaaacatggaaaatagatatttctccatctgtgtggaccttgttatcagagtccaaaccatctaggctgtggccctggtctcccaaagcccccagctgagtccttattttagtattgcttagagagagaatagatatcaaattgttctcaccatcagttagcacagagtagcacatttctgaccactggagcccatgctggaacatcatccttgtgggcccctttccctccctatcaactcatgcaaattgacacctgggaaagaagtaggattaccaacccctcaatttaaaagacgtgataaagctttgaatcccagtttgggctcagctgttatcaccttgtatcaaaataattttttagtccagattctttcagttacaagtgttagaaatctacctaactcaacttcagacagcaaactgaagctatgagctcatgaaaatggatcctggtgctcttgcagtaccatcaggattcagtctctgccaggcttctccttaagctgccttcagatttaatagactcacatcgtggtggcaaaaatgtcaccaacagcttcaaagttcaatttctaccagttcagtgactccagctaaaaaataactgtgctattcaaaacgtccaacaaaaatcccagctctaaatattattggaccaatctgagccacatggacatccctgaattaataagcactgtgacctggggggcggactaaaccaagtggccatccttgaatcaagccattccctcaagagacaggagtggaaccagccaagctagccacaaaataaagcatggacctgggtgggctctacaaagggaaactgcaggactttaaccagcggaagggaaagcaaatgccagacaagcaggaccacagctcttcctcaatgttgtgggaaatcagggaccccaaacagagggaccagctgaagccatggcagaagaacgtggattgtgaagattttatggacatttattagttccccaaattaatacttttgtaatttcttatgcctgtctttactgcaatctctaaacataaattgtgaagatttcatggatacttatcacttccccaatcaatacccttgtgatttcctatgcctgtctttactttaatctcttaatcctgtcagctgaggcggatgtatattgcctcaggaccctgtagtaattgcattaactgcacaaattgtacagcatgtgtgtttaaaccatatgaaatgtgggaaccttgaaaaaagaacaggataacagcaattgttcagggaataagagagaaaaccttaaactctgactgccggtgagctgggtggaacagagtcatatttctcttctttcaaaagcaaatgggagaaatatcgctgaattatttttctcagcatggaacattcgtgagaaagagaatacgcgcctggaggtataggattataaacagccccccaggtgtgcctgtctcttatggttgaggctgcagagatgaaataaactccagtctcccatagcactcccaggcttattaggaagaggaaattcccacctaataaattttggtcagaccagttgatctcaaaaccctgtctcctgataagatgttatcaatgacaatggtgcctgaaacttcattagcaattttaattttgcctcggtactgtggtcctgtgatcccgccctgcctccaattgccttgtgattttctattaccctgttaagtacttgatgtctgtcacccacacctattcgcacactccctccccttttgaaaatccctataaaaacttgctggtttttgtggcttgtggggcatcacggatcctaccaatgtgtgatatctcccccggatgcccagctttgaaatttccctcttttgtactctgtccctttatttctcaagctggctgatgcttaggaaaaatagaaaagaacctacgtgattatcagggcaggttccccgatactccaataccatgtatgtccatcttttgactaatttttgtgtcttatatttatattacatttacttcttatgtattgtaatatggaagtttcttggtagtccccaaactacttagcaaaaacctggcaaatgctagttgattaggttctcagaattctttggtacccgttgccctgtaaaaaataaaacctcttttgggactatgaaaacagagtgagagatagctgtatctctgaatggcaaatgggacagtcaactccctcaattcagagaaagtctggttgccagaggtttttaaaattaaatattcagccatgaggaattacaccaaaagcaaagcctgagaaaagaaagtaggaatggacattttgtttgggaggtgatctcaggaagcaggagtgtgggagctgagagagtggtcaaaagaataaagattgaccaatataaggatgcactgttcaagtcactgctgtgagcaaaagcagctcagttctgccggggcctcttgagaggcatggagaatggctcccagaattatcatctcaggacaggcagtgtaggctttttttccagttcctgtccctcattgctgaggactgcaccttgaggcaatagttcttgaaaccccacttttgggctgtagcatcagagaaatgctgagttggaaatagaggcaaatagcacaagcttcaggttggtgactgtcagaggagaccctgagcctgggtggaactgtctgccatggccccagctctcactggaagagggctgaggtgaggtggacaaaggtaccagggtgcatgttacaaggtgtgcccgcctcagggagttctgccagaccatttctcagcctgggtcagagatggacccagttcagatggataaaggtggctggatcaagctgccattcctactaaaactgtttaactacattaaaaatcaccacatttctggtcttgccagtaccatcttcctcctccaacaaacatgcatagttttcaacccattttaggacagatgtgtcatttcacaccagctctcaacattgcattcaaaacctaacagatatgctttgagactggagtagccacgggtcaggcatggtagagactccattacagtgccgctccccctgtgacctcagcattgctatcttttagtgaagctgtaagactagtaaaagacaaacatgattttctccaggcttgtttgctcctctctgggtatgaggcagcagcatatcagaatgaaacagaactgggggctacaaccctagaaaactgagctcaatcaaactggaaaatacatattctccaaccaaagccataaggttctcttctcagatgccaacagctgtgacaaatctgcatttcccttgttttcagtcactctctctgggccctcttggatcccttgcacacacctccatcagcctgcctctgggaattgtcagctgcagttagtgggacagctaggctgggtcgagagaggcagccctctccagagccaccaaaatcatcagacagtgagaatgcagcagacacggtcctgcagtagatgtggtccttctctgaaggactaagtggattaccgagaatgctggccacagggaactcttgatggcatttgtgaaatggttacaaacacaaaacctgctgcctttatttatggtcaaccactgaacatctttccaagcctagcctgtaatcctcagtgctaaaataataaggtaggcaagctgtgtttcttgattctaagagtctatgattctgccctagaaaacaaagtttatagttgctgaggcaggatcctcagggttggcttttctccctacccctgatacatgaccagtgaaaaccacaactacaattctaagccccccaactgactgaatagactccctcttggctaaggaaatcccaaagaaacccaaaaaactagttcaggccatagtgggaaggaacggtcacacatgccttcctttggagtttaggtaaaactggccagcattaacattagaacagaaatcataagactgacaagatagaccgtttgtagcaataagacaccaaattccaacctgactcaagtagagcattataaaacagcagatgctgctttgaagaaaatcaaagtgttttctctctaaatatgtttctttaacatattttgaaatgaccctacaaagatttcttttgtgggggaaatttgtattctgtagagaatctccttcccttactaggtcttttccagagagtctgacatcctttatttatcattttttttcttgagatggagtctcactctgttgcccaggctggagtgcggtggcactatctcagcacactgcaacttccacctcccaagttcaagccattctccttccaagtagctggaattaaaggtgcccaccaccacaactggctaatttttgtatttttagtagagacaggtttcaccatgttggacaggctggtctcaaactcctgacctcaagtgatccacccatctccgcctcccaaagtgctgggattacaagcatgagccaccacgcccagcctgacatcttttaccaactaccctctctgaagtctgctacctggaggcttcatttacattgtaggtactttggcttccacaacctcctttatctaaattcaagcattttttattttttctttccaacttttattttaggctcaagggtacatgtgccagtttgttactgggtaaatttcatgttgcaggggtttggtgtatagaaaattttgtcacccaggttatcagcatcataccagataggaaatttttcaatcctcaccctcctcccaccctcgaccctcaaataggccccagtgttacttgtttccttctttgtgttcatgtgtacttaatgtttagctcccacttttaagtgagaacatgtgatatatggttttctgtttctctattaattcacttaagataatggcctccagttctattcatgttgctgcaaaagacatgatcttgttctttttttatgactgtatagtatttcttaatgtatatgtccagtcactactgatgggcttctgggttgattctatgtctttactactgtgagcagtgctgtgatgaacatacacatgcatgtgtctttatggtaggacaatttacattcctttgagtattaaggctggcttcaagcttttcaggcataggttaaccttttcaacctattgccaatcaaaaaaaaaatctttgaatccatctatgacctagaatcccctggcttcaagacatcctgtctttctgggtcaaaccgatgtatactttccatgtattgatttatgtttttgcctacatctgtcttactaaaattcataaaaccaaactgtaacccaatcaataggttcccaggacctcctgagactgtatcacaaaccatggatcttaacctaggaaaaaaaaaaactctaaattgattgagatctgtcttagatagtttttggtttataccaacagcacatccaccagctgtttttctcactaggtcaaccagtaaaatcagtaaaatgcaatcactttcaatttcctcctcacccacaaatctcttctttgagcaaaactttgcacgtccaccatgttgctaagacaggctcttgaggactcctcccaaggggagtagctaagtcaggtgtggaggctagcgaagaggcctttgggggcaaagggggaatctccctctgtggatagatgctggggtatgagcacagagaaaagctgcctcttttagcctatttttccccaatatctgttttactttcataacaattccttaaacattctttcatcacagtcttaacaatgactttatgaacaggaattcttaaaaaatgtttgcaataatgtcacttctgaagaatgttctcctgccttcacctgccttccagactccaacaagctttgcttctgtctcccacccacacgcaccactaatgtctcttgtgaaaggaaaataaatcttgaggcccccaaatcactaagcttaaggaaaaagtcaggctgggaactgcttagggccaacctgcctcccattctactcaaagtcacccctctgctcccctgacctagatgcatatctgatttgtctgcttttggaaaggctaatcagaaactcaaaagaatgcaaccatttgtctcacctatctgtgacctgaaagccccctccccgcttcatgtcttcaagtgtgccaccctttgcttcaagtgtgccacctttccaggctgaagcaatgtactttttacatacattgattgatgtctcatgtctccctaaaatgtataaaactaagcggtgccccgaccactttaggcacatgtccttaggacttcctgaggctgtgtcacggatgcgtcctcaaccttggcaaaagaaactttctaaattaactgagatctgtctcagattttctggttttacactctgttgtcttagtctgagctcctcagaagcagacactgagataatgtgtcccttgagtgcaaggggaatattggaaagacaatcttaggcagcatttgtagatgagtcgggtatgagacaggaagggaaggcagccgacacagggcacattcagggatggtgtggcctcaggcagctgtggccccataccctcagggggacctttgggaaatgatgtgacacacaggacagtcccacagtagggacaaggatctgaggtgtttccctaccactcctattggttatcactgagggtactccccagggtgtcagtgtcctgaactctcaatttaccctgcttatgatgcaggagaaagccttcaggtcttggagagtgacagacactcacagaaatataccaggaacacatacaggaagcaccgaggggatccaggcaggacaccaaccgcctcttcaagtcccctagcctgctggtttcagctgtgccgtggctgtcactcctgtgagccccacaccctcctggaatcagaaactgcctgccatctctctgtctctacaacacccctcagaagactcagttcatagcagatgctcagcaaatgctttcaaaagaaacagaagcagtagcatgaggtaattgttgaccaagaaaactcagaaaacatttatttgggcaagaaagtagaacgaagaaacccaccaattcctagtggaggggaagaagattggagagggatcttcagggcatggcataaagcctgttccgatggagaaaccaaccatcctgattcccccttgctgccctgggagccacttggcattaaaaggtagctttccagggcaaagacttcccctggagagactgcaaagatctcctgtcctccctataagtcagcaaacaggcatgactgtacgtttttggttttgtctgtgtctttctggtcttcccagccatcagagaagagaggattgggctttcttccatttaagttctgggctgtaaaggcacttcctgagtaggcctgaggggctgtggtgagagaatagggctttgtgtagaggggcagcctgggtggaggctgcctgggaagcagactgttgggagggtgtgagaaggtgccctgcagcacagttcttgcctgaagacctcctggccctcacctgcttccccacgtctgctactagcactgctccatctggttgccttcaaggaaaccctccaatatcccctgtctccttccccaggataactttaagatcaaaaagtgtatgacaagagatggagaagaggagcttctgcacttggttggagaaaagaaagggaacaagtggaatttgtaccaaggaacctggagcttgcatttaattcagactgattcagctgggctaggctctgtgactctgcacttgtaacgagttccaggtgatccccatggtgctggtcagacacttcagtgagcagcaagtcaccaggtgcctgagctggtgcactgcggagtgcacacatctattacagccacaaattacacaaggccctctcctttggctagaaattacatggggctttgattgcatttctttcatgattagtgatgtgaggcattttttcatatgtttgttgaccattcctattatgtcttcttttgagaaatatctgttcatgtcctttgcccatttttctacaggattgcttggtttttttcttgttactttgtttaagttccttacagattctagatattagtcttttgttggatgcatcatttttgaatattttctcccattctgtaggttgcctgtttaccctgttgatagtttctcttactgtacagaaactctttagtttaattaggtcccgattgtcaattcttgtttttgttgtgtttacttttgaggacttagtcataaattctttgcagaggtcagcgtggtacatatgtaccacagactactacagacatgaaaaaaggatgaaatcctgtcctttgcagcaacatgtatgcaactggaggccattctcctaagtgaattaatgcagaaacagaaagtcaaatacaccatgctttgacttgtaaatgggagttaagcattgagtatacatggatgtaaagatgagaacaacagacactggggactactaggtggggagggagaaggcagaaggttgaaaactaactattgggtactatgttctacgtactatgctatttgtgtgatgggttcaatagaagcccaaaccttagtaacacacaatgtatttatgtaacaaacctacgcatgcacctcctgaatctaaaataaatgtttttaaggaaagaaactataaaaagctttaatttattattgtgtcaatcagagtccttgcagtaaagagatggctcacctaaattggacaatttgaggagagaataatattgctattttatacatgatatcttaatgaagatatcatgtgtaaaagtgtgggcagagtgtaggaaatccaaaagaatagtgcaacatcccagggccagtcacacagtagaggagagggcctttgatgggagccttggcctttggccaagagagacagccagcccaaataatccagaaaaaaaccaactcccctccttccctctgatctcctctgccctctcatgggtcaaacgcaaacctggatcaaggaaacgctgcctgcccaggtcagcctcctggggccttaacagagtggagcagagtaaagggggtatgaaggggcacagttaaatgtctacatgttgtaagtccttgttcagctgcctaagctttttctgagcaagttcaggaatatattaatataaaccagggataggcagcactgtttgtaaattaccagctagcagatatcttagtctttgcagaccagactatctctgtcacagacactcaacttggcctttgtagtgagaaagcagctgtatgcacgcagtaaaccatgagtgtagctgcttctaacacaatgccactcacaaaggcaggcctgcgggtcaaatgcactttgcccaccctgatagaaacacactcacacattctctctcttcctccccactcctcctcattctttctccccctccaagcgtgtgctgcaacaggaggaggtgaaactggatctgatttggggacaaggatggtttgcagagaggaatcggtgaacagtggtgggaaaggaaaagaaacatccagaggagattggtgagcaaaagtaggagtcatctttgtgtaagagggaaatagattttttttaaaaaatggtttaactatgaggactatgcaaatcaggcaaaaacaatcagggccaccttcaagaggcattagggagacacaggaatgggggtcccaggaggatggccccggcaggaggacaggccaccacacagcatccccacatcggccccagtgagagctgcagaaaggctgtttactgtgctggatcccacaccaaactactgattaactgtgtcacagcttaaatgtgtcattttgtcagcaaacttgtatcttcctacaagctgttaattaacgtgtcagaaaaagcgacttgcagaaggcttctcggtgcaaaacaggagcccaaaaccaaccactaagcagcacattcagaaatggctcctgacagacatgcacagatatggagcagatgcggtctgccggccagcattctaacacacagcattctaatcccaaatccttgggagcctcaaggaatgaccagctgtgcatcatggggaaagggcggcagtgggcagaggcccaggacagctctacttaaggctctgggagactgtagcggagacagccccggccccatcctctctgccttaatcacctacaggcatcctgccgttgtccacactgccccacctggtgctctctctgcacagggatggggtcaggctggatacaggagggcactaatgctactcccctccccagcagccctcaggcaaagacagagacaagctgaagtcagaagacacataaccagcattctcagccctcagtggaacaactatcacatgacacccatgtcccttactaaaggtcccatgctaacactgaacccctgctgcccacgatgacagataatctgctcatattgtctgtggcaccacccccaccccccaccacgcccatctcactaccatagttcctgcaaacgcttgtgttcacatccttgtctcagggcctgcttcttggaaaactcagcctcaggcacttatgtcccactctcctggggatgaggaatcgagtacccagtcttgggaaagcccttgcttcccagccacgatcagagggaagcatgctaactcatctgggctcgggcatcagggcatccagagaggaataaactggttcccatcaggagatcatcgtaagttagggttaagcaactaccattcattgacttgtggccagcatgaatctctgcactcaccatgaagtctccttgcacctgtctgccccttcctacctggcaaatcccaacccaaagccatggtatgtccaaaatgtcacatttctgttttgtttttaagttaccgtaatttcaactctgagcccacattcctctagcttctgtcattctcagaactgcccattctttgaaaaccaaatccaacctcacccaagtggcacaaaggtcctagttaaggcatgaaccatagaatcagatgacctagatcttaattctgcctctgcaaattattagctgggtcaccttgggtgagctgttgacttttgtgagcctcagtttccccatctgtataaagaagataagaacagtaactgcctcatggggatgttgaggattgaatgaggtaatatgcgcaaagcacttaggacagcacctggaacttggtgagctccacagaagtgtccatcccaggtacacggcccctccaggctggcccttctgctgctgaacttcaggtttataaatctcaggaaacagacacattgcaagtctctgatcctgaaagccacaagcctcccccaaccttccatcaggaaggaatctaatttgagtcctgcaaaatccttcccactctctgtgttcctccgtgacgtccctctccaatctcctccctggcgtacctccccgaggggcttcagagacagcaaccaggacaggccgccttgccaactatgctgtgctctgccctccattcctcctcgaggcaagaaagaaggggctgtagagccctgggatagggaatggcaataagagaagtagagagaaagcgcccatgaacaccacagagggaattacctgctgcatgttcgtcatcgtggaatggttatgaatgactgagtgtgcagcaggcactgtgctgagccctggaagacaatgccagggaagacagtgccgggcaggtccccttcttacttgtcaggaagcagtgctgcttcaatgtgaatgtgcacacaaatgcttcccagggcttccaagccccattcacagcaatcacttcggaaaaccatgaagtcgcccaaaatctccatttttttttttttttaacagagtctcactttgtcaccaggctggagtgcagtggcgcaattttggctcaatgcaatttctgcctcccaggttcaagcgattctcctgcctcagcttcccgagtagctgggattacaggcacacaccaccacgcccagctaattttttgtatttttagtagagactaggtttcaccatattggtcaggatgtctcgatctcttgacctcgtaatccccctgcctcagcctcccaaagtgctgggattacaggcatgagccaccgtgcccggccagaaatctccatttttaataaacatacctgcggactggaatgtagatcgtcctcaggccctaccttgaagacaagcctaggcctaaaatgttaaataccaggggaaagcagccagtaagtgcacagagttcagaaattgcagttgagtgcattatggtgtgactttatctcttctgtccggtgttggcaaggagaagctgcctcctatttccttatgttctgcagcaagcatggtgtcatacaaggaagctgcgaggtatgggtccctcaaatgattgactggggaagagacgggaggggctggcaagaacacaaagtacagtcagttacccaccgcctgctgccaacattgcattggcagagcaagctgccagcttcttgatgatcctgaactctcctgcaagtagaggcaaagcaaaagcaagtgtgaaacatgcacgtgtattctccgaagaggttgacccatgaacatgcatggcattggccagtcccaacagccttgagctacttgtgtgacaccaccacagctccagcgtaattatctgtctctctccttcacctgtctcaggaagccaggccaacctgaagacagcacatgtaggctctggctacgtctctcttggtgatctagcccagcctgggacacctccacctgtctccgtctcctggaaaaagggccccgggactttggagtatggcctgcccataatgagggaggtctttagcatgattctcagttgtaagcttgggctagacttgcagatttagaatttttttctccgattaaaaaagcacattcatgtatgccttacccaagaggaaattctgaagataggaaatatcatcaaacgaatcagggtaaatgtttgaattgtccaaacattatttgcatgcctcaattttgtgtaatatccctttaagtgattttattatttatttatttaagagactgggtcttgctctgtcacccaggctggagtgtacttaggctaaagtgatcctcccacctcagcctcctaagtagctgggaccacaggttaattaaaaaattaaccaaacctggctaattattttaatttttaattttgttttctttttatagagattgagtctccctgtgttgcccaggctagtctcaaactcctggcctcaagcagtcctcctgccttggcctccaaaaatgtggggattacaagcctgagccaccatgcctggcttctttaagtgattttaaataagaaaggaggaacggtgataataaagaaaagaggaacagattaagaagaaagtggagagggagggaaaggaagagagaaaagaagcaaggatgcatgcggaggctggaggcaggggaattgcgtctggcccgccctctgccatgaaatcccgaccttgcaagtttccacgatcttgcatagggaatcatgagacttcaggcttttgtctccatcagaaaccaatcagagccaggtacactgctggaagcagctcctgcttgcagaggatgccaggtggacagtggcagtcccctccccactgaagcctctgggtgagcagctaattcccaccctgacacatagacatctgagaaattttggcattcttttccagtagtagccacctacactgtactctgatgacagcctcccttaagcagaatgccagagctcggcaacacaaccaggagactatcactgtctccaaggcttgggtttgttgtgcattcttgttgatttcaaaacaaggcaaaaaagcacacccctcatgtgaaaaagtaaataaataaatcaggctggacctgcccctcctgctatgaaaaatcaaagtgttccttttcctgggttctattagagaaaggagcagctcaagttcaaagccagaagcaggagaattgaaggaggacatgaaagcattctctccccttaaagaaagtgcagatcccatgaaagataacccatgaaggttatctttcaggaactctagtcctaacttgattagtgtctgtgctaggattgagaagtccaagggaacacgtgccagggttgcatatggggctgaggaggggaagcctcacgcctggcagtccctggcctggggtatgccatacagcaccttggttccaagcctgtctctctcatcatccatctttctctccccctgggaatacccaacacactaaaccctatcaatctccataaaacaccactgcatgtacaacaccccttgcccgtaatgcttgcttggttctccacttccaaaaacccagcctttcgggcccctgctttggcccacttgttgcttcctgtgggctagtcaggccagaggcccactcagacaccaaaatgacagcattcatcaccagctccaaacttggacctgtactgccctttcaacttgctcctccccttccccattcaaatctccaccaactttcaagccttatccactcaggaaggcctttatccatctcatcgctgagtcccagctctatgccaggcactgttctaggcaccaggactgttggtacctcctttccccaagatctcaaaacacctgtttgttccatgttttcagccacttgttgaatactgtcccagagtttccctcattaatcataggagatcattcaatgagtcagtgcctcacaccttccttatttttttagacggtgtctcactctgtcgcccaggctggagtgcaatggctcaatctaggctcactgccacctccgcctcctggtttcaagtgattctcctgcctccgcatcccaagtagttgggattacaggcacccacaactacacctggctaatttttgtatctttagtagagacagggtttcaccatgttggccaggctgttcttggacttctggcctcaggtgatctgcccacctcaacctcctaaactgctgggattacaggtgtgagccaccatgtttggccacaccttccattttatacccagccattattttctctctggaagcttagggggatgaccagaatgccagcaaagagcagattttcatgcaagcagccaacaaactcatttttaaaagttcaacatcacatcatcagagaaatgcaaactaaaaccatggtgagataacattttacaccaatcagaatatccattattacatggaatcaactaaatgcccataaatggtagactggataaaaaaaaatgtggtacatacacaccatggaatactatgcagccataaaaagaacaagatcatgtcctttgcagggacatgaatggagctggaagccattatccttagcaagctaacacaggaacagaaaatcaaacactgcatgttgtgactgttaagtagaagctaaatgatgagaacatatggacacatagaggtgaacaacacacactggggcctaatggagggtagagggttggaggagggagaggatcaggaagaataactaatgggtactaggcttaatatctgggtgatgaaataatctgtacaacaaaccttcatgacacaagtttatctatccaacaagcatgcacatgtaccgctgaacttaaagtaaaactcaaaaaaataaaaaataaaaaaacaacagatttgtcatgaatacagagaaagggaaaggctcataccatgttggtaggtacataagttagttcatcctgtatggaaaacagtacggagatgtctcagagagctgaaaatagaactaccatgtgacccagcaatctcactactaggtatctacccaaaggaaaatatatcattgtattaaaaagacgcctgcattcagatgttcatcacagcattattcacgatagcaaagtcatggaatcaacataagtgtcaaccaatacatgattggataaataaaatgtgctatagattcactgtggaatactatgcagccataaaaatgaataaaaccatgttctttgcagcaacatgagtgcagctggtggccattatcctaagtgaagtaactcagaaacagaaagcccaataccacatgttctcacctataagtgggagctaaactatgggcacacagagatactaggatgaaaataatatacactggggactcgaaaagcagtgaaggtgaggaggtgatggttgaaaaattacccattaggtgaaatgtttactatttggggaatgcatacactagaagcccaattcccactagtgttcaaaatacccatgtaataaatctgcccatgtacagaatctaacataaaatatattttttaaagtacatttttaggcccggtgcagtggctcacacctgtaatcctagcactttgggaggccaaggtggacagatcacaaggtcaggagttcaagaccagcatgaccaacatggtgaaaccctatctctactaaaaagacaaaaaaaaaaaattagtcaggcctggtggtgtgcacccataatcccagctactcaggaggctgaggcaggagaatcccttgaacccaggaggcggaggttgcaatgagccgagattgtgccactgtactccagcctgggcgacagagcaagactccgtctcaaaaacaaaaaacaaaacaaaacaaaagattagatttttaatgatgggagatggccccagaataactgctgtggttcttagaacaacagaaataatagctatggttcttaaaacaacagaaagaaaatcatgggtggaaatcctgagtctgtttttgtttgtttttaacctctccaggatgcaccctgaaagataagtcaatgagttgatgtctgctggtgaaagctctgatgtaagagggaaagaagctacttgggagaaataaactagaaaccagaagaggaaggaatattcttccccaaacacctctcttaggaaggggaaggaagggtggcatttgttggaaataccttcagatgctgagggtgggagctgtacagccttaatgctgagggagaggaacagtggaaatgagctctgcaccaaagaggagaacaggtttgctctgaaggcgggtgggagaaaaaggtgaaggaaagcaggttaagaaagaaaagagaagatatttacggtaggcagctgtgcagtgtgcaaagttaccatccctcatagcctgaaatcctccaaaaagcattaaaaaacttacaaaatgttttctgagtggattttttattgtacctataagttgtttttattatacttataagttctagggtacaagtgcacaacatggaggtttgttacatatgtatacatgtgccatgttggtgtgatgcacccattaactcgtcatttacattaggtatatctcctaatgctatccctcccccagcccccccaaccctatgacagggcccagtgtgtgatgttccctgccctgtgtccaagtgttctcattgttcaattcccacctatgagtgagaatatggagtgtttggttttctgtccttgtgatagtttgctcagaatgatggtttccagcttcatccatgtccctacaaaggacatgaactcatccttttttatggctgcatagtattccatggtgtatatgtgccacattttcttaatctagtctatcattgatggatatttcggttggttccaagtctttgctattgtgaatagtgccgcagtaaacatatgtgtgcatgtgtctttatagctgcatgatttataaacctttgggtatatacccagtaatgggatggctggatcaaatgatatttctacttctagatccttgaggaatcgccacacggtcttccacaatggttgaactactttacagtcccaccaacagggtaaaagtttccctatttctccacatcttctgtagccctattgtttcctgactttttaatgatcgccattctaactggtgtgaaatgctatctcattgtggtttgattcgcatttctctgatgtccagagatgatgagcattttttcatgtgtctgttggctgcataaatgtcttcttttgagaagtgtctgttcatatccttcacccactttttgatggggttgtttgactttttcttgtaaatttgtttaagttctttgtagattctggatattagccctttgtcagatgggtaaattgtaaaaattttctcccattctataggttgcctgttcaccctgatggtagtttattttgaaaagaggaagtcaaattgtccctctttgcagatgacatgattgtatatctagaaaaccccattgtctcagcccaaaatctccttaagctgataggcaacttcagcaaagtctcaggatacaaaatcaatgtacaaaaatcacaagcattcctatacaccaataacagacagagagccaaatcatgaatgaactcccattcacaattgcttcaaagagaataaaatacctaggaatccaacttacaagggatgtgaaggacctcttcaaggagaactacaaaccactgctcaacgaaataaaagaggatacaaacaaatgggagaacattccatgcccatggataggaagaatcaatatcatgaaaatggccatactgcccaaggtaatttatagattcaatgccaaccccatcaagctaccaatgactttcttcacagaattggaaaaaactactttaaagttcatatggaaccaaaaaagagcccgcattaccaagacgatcctaagccaaaagaacaaagctggaggcatcatgctacctgacttcaaactatactacaagactccagtaaccaaagcagcatggtacttgtaccaaaacagagatatagatcaatggaacagagcagagccctcagaaataataccacacatctacaactatctgatctttgacaaacctgacaaaaacaagaaatggggaagggattccctatttaataaatggtgcttggaaaactggttagccatatgtagaaagctgaaactggatcccttccttacaccttatacaaaaattaattcaagatggattaaagacttaaatgttagacctaaaaccataaaaacactaaaagaaaacctaggcaataccattcaggacataggcacgggctaggacttcatgactaaaacaccaaaagcaatggcaacaaaagccaaaattgacaaatgggatctaattaaactaaagagcttctgagtggatttttagtaaaattcagggaataaccagagacatggggcaaagcagcaacagacagcaaaaatgaagaatccaggtgcatttgctaagagtttagggaggagtaagtcttctctaagttatgaaattgaatgtaccagaacaaagaaaacaaatgaaaaactcacaggcagggtgcagtggctcatgcctgtaattggagcacttcagtaggccaaggtggaaggatcacttgagcccaggagtttgagaccagccttagcaacatgtcaagatcctgtcttcacaaaaaatacacagattagcagagtgtagtgatgcatgcccgtggtcccaagtactcaggaagctgaggcaggaggattgcttgagcccagaagtttgaggctgcagtgaactatgatcatgtcacagaactacagcctaggcagcagagtgaaaaattctctcaggtaaaggaaggaaggaaggaaggaaggaaggaaggaaggaaggaaggaaggaaggaaggaaggaaggagagagaatgagaaaaattcacaaaacatcaaaaacctggagaatttccaacacccagtttcagagatgtagactctcgagtgcatagatggggctgcatcctggaaggagctaggttcctcagcatcctgcctccaggaggaggctcctgagaaggaaaggcctggcctaggagcttaggcaccccagcttcccatgcacttgatcagtatcacctcttctccttgctagagctcttttgataagtacatgtcatcaggactttgagtagcttagagctgccaggccttgtgtctgcaagtactgatgatgtatcacaggctgtagcctgtctttctacagcctgatagacacccccatggaaatatgggagcccagcctcctctcttcaaggctcctccacggtctgaatcagaagtgtgcatcagaataacttgggagctgttttgggtcttactaccctcgcaggtccgtcccttccacttctcagtgcattgctgctgtgttgctctaattcaccttcaaaccactcaccccagggaggcttcagccacccccaaaccatgacgtcattgatgccaccatcgtattcaggacagctgttcattccctcactgtggtatgggtaggaaaatgatgcccccacctgtgttagcctcacttcaagaggcccggtaacaggatggatcccacaggattactccctctgcttagaacatgtcccgctttctccccaagaggggcacacatgctgcagcagggcaggtcaggaggggcttggagcctcactcctggtactgaatccaactttttctcccaggccctcttcctagggtgcttctttcccagggcctctgcttcctgggttcttggcttggcttccactgggcctctctcaatatgcctgccccaaactgaacgtccatccctgacatcaagtttccatgttaatggagtatttacagaggaagtgaaaagagccccaggactcccatgcccccatccaccttagtcaggctcagccaggacacctggttatgtcctcaggtacctgtctcttcacccaacagtgagcctctgggagatgaggaacacagattcaggggcccagcagcattgttttctaaatcgcccttgttctccctctgcattttactcactgggtgaccttgagtgaaggccttcctctctctttgcttccatcctcacgtctgtaagatggcaatgcagctgttacatagaggtgccaacaaggcacccttgaaactctgagagctaaattacaaaactaaggcataatagattgaggttggatggagtcaaggacatctaaaggacaggctgccttccagagcccgagcaagagaagccatgagctcagctggagcctaagggacagagccattaacaaacctaaagaccatgtcaaaggtgggggtgggagcagccctgaggcactctttgggcccttccccaggtctgtcccagggggagaggggtgggatgtgcctacatggtggagcctgatcccgtgaaattttgaagtccctctaattcctctcgcactgactttatccctgcaaatagacttccgatttctttttctccttttggtttttgtggatgaactaatgctttgtaagcactttgaaaactagaaatcattacacaaagttaagaactcactattttaacatggaggatggagcctgacatcaggcctttagggcacgttcaccatgccaagaagagaaaactaccaacttgtaaaacagcagaagcatttgctaccagctggcatgtaaagtcccctgaaaactgaacaatagagatattttcaagaaaagacaaatgatcccagtcttgggatcctgacagctgcgttgtcattgtggtttgagggcttcttgagcattgctacaccccaaagatgccttgggacagtggtgctcatctttttggaaggctattttacttagagcactgctagctgtttaacaaaaaaacccggaaatgtccgtggcttaccacaacaggagctcgcttctagcagggtgctactgtggctgttgtgggtgagcaagccgcattcctcatgtggaggttcagtgaccgtctccttccatctgtggctgtaccacccctaaggcctcagaggcttctgcagtcaatcagccaaaagagaaagatacagtgtagggggcgcgcctgctccctaaaagcagtcgggatgtgacccatcttaccgaggtaggacatcagcacttgtttctcagtcccaatgagatgaagtgaagaaaccagcagagaccagcagatggcaaggaaagggacccctggctgccctcactgtgcattagcacgagagcacaaggcactcccacaactgccatgacaatttataaatgcatggtgataaccaggaagctactgcccctttctatggcagcgacctggaaattgccacccatttcctagaaagttctaaataacccacccctcaatttgcatggaattaaagtggacataagaaagtgtaaataccattgcctgtggactctgggcgcactgcctatgaattatccctgacccacaaggaacagtactgttcaatgaaaaattgccatctcacaccactggctcgcccttgagttttttcctgggcaaagccaagaacactgccaggctaagcctcaattctggggctcacctgtccacctacatcattactctgctcatgcagcactgccaaaaaacttttcacatggccacatctggaggtaaagggaaacatatccctggccagccagcttcacaccacagaaggaggcacaggctttggggtacggctagctgacactgccatgggtcataatcccccttcaaaaacagatgaaaaccgagagctgtcttcccatggaaggagaaaaagacatggctccctaagggacccattcattcatcaacattccattgattaaatctgctactgaaggtttttgagcagagtaaacacattcatatattatattcatattcctcccccctctgtctctctgtctccccacctcttcccctaaagagagaaaaatgaattttaaaaatagaaagaaaggagggacaattcagaaacaagatatttcaaccaatatttctggaacaccaagtagagggaaaagtatttactgatgtagaaagaagaaagttggtcccaagaactgtggaagagaggtcagctccttaaaacaacagaatgctttttaaaataagaaatcagccaacaagggagattaaacatgtaattactgaaattaaaaatagaattactgaaattacagtgcaaaagaaagttttgagggtaggattgagtagaatgacaacaatttggaaaataaaaacaatatgaaaaatagaaaaaaaaaaagaatactgccagttgatactgtaagctcctggagtcaccccaccgcaagggcactggtgactagtgaggggtgcatgtcctcagcactgccatgcaagcccaggagctattagagattgtactgaagtattggagtcactagtggaaattggagcatctggaaaaatgggggagggatttttaaaactgtattttaaatatgacttttcctttgtctaaattaaagtattcaagtagctaaaactctggggcagggagggtgatcccctggtttgtgacctcactcccctgccttaagctctctgagaaagcgcatgctggttctggtctcaggaggatgtatagccatgagcttgggggcaccccaccttttatccactctgtgaatttctcttcctctcccaagtagtacatttccccaagtgggagtcagtccatctagaataatgcagtaggaagtctgtggttgtgagtccactgtaatccccaggttacatgcagagatgccccaaatccaatcacctttaaagtagtgtgaggttcaaatacactctatgttacaattatccagcaggtgaatttttaaacacacacacacatacacacacacacacacagcaaacgttaagatacacatccaaagagaaaacttgaaatctcagagagagcacaggctctgggactgcaaaatcaaatgacttttaaggaccgagtccaggcagttaagccagtcactgtgtgcagtgggcagagtggaaactggcagggctcatgccctcctccatcatgtagaggaacagctgttatttcaccccactgcacagctgctgtgtgtaagttgaactaggtttgtcagatcatatgactttctgggaaaggataggaatctagattttttttttaaattggtcaaagtattccctccattagtcttacttctttataaggccataaaaagagatgtccctctatgtgagggtctgaattttttttattaactataagttctagggtacatgtgcacaacgtgcaggtttgttacataggtatacatgtgccatgttggtgtgctgtacccattaacttgtcatttacattaggtatttctcctaatgctattcctcccccagcccccgccccgaccctacaacaggccctggtgtgtgatgttccccaccctgtgtccaagtgttctcattgttcaattctcaccaataagtgagaacatgtgtttggttttctgtccttgtggtagtttgctcagaatgatggtttttagcttcatccatgtccctgcaaaggacatgaattcatcctttttatggctgcatagtattccatggtgtatatgtgccagattttcttaatccaatctagatttttatataaaatcttcaaatatttgaacttgttaaattcaaacaaaacagtttggcctacatgtggatgcctgtttactgtttctggtttgaattcattgttttaaaaagagacaatgtgtgaagccttccctgccttggacagtggagtgggctcctttgtcaacaatgtttagtagccttgctgctttcctgagtcactgcgcccttccatgtggcacacaggggccggattaaacagttgggggtggcacaaggatgtgtctttccgcgggtcattttttgaagtaaaataaaagacacagatatatacatcagacacacaagcgcagcacagcacaagatggaaaatgattcattctgttctgcaggtgctacaggaatttgaagaagagaggtcagttcggaccagagactttcaggcttcctggaagaggtggggtagaactccatgtcaccccatgaaatgtgggacggctttcaggacaagttcctgccctggaaataaaaagaagtggggtgtgggactgcaaagaacctcaagggtctacgcagtgaaatgttaattataatgctcattcatttatctctgggtctataaaaggaataaagtggaaaagaagttggacaggagcctccacactagccaaggacatggacaaggagagagaaaaacacagtttaaattcatggtgttcagcagagaaaggagatcttgtaagcaaatgttaattaagtacaatttgaaaatgagtttatagcatcagtgccacactgcggtagttccaattaatctccaacattcctttcatgatccatgaatgtctacctctttacctgtgatggaagagtatagcttgaatggtcattatggttcaaattaaaataactcatctctagcatatgagatatatgagtcacccattttcacaacttaatttatacttgattctcaacaacaaaaaacaaataaagatgtgatttagctctgctctaaacccagactccagtccctatctcctccaaatcatctatcttgctgtaatcaacatttttatttcattttattttatttttatttttattttttgtagagatggagtcttactatattgctcaggctggtcttgaactcctggcttcaagtgatcctctcacctcagcctccccaaatgctaaaattacaggcatgagcaccactgcacctggccctgaattttctttttaaatcacaaatcaaatcatgtcactgccctacttagcatccttcaaaactgacccatagacactgaagctttggtttagcacaaggtggggccctgtctgaaccagaagcatgcacgtttgaggaggaagtggtagctgactataacatttaatatgtctcactactgtagtttttgacgtgcttttttcactccaacccaacagaaaatgacacacccatattatgggtgaaaaacaattgctgtgctagctagccattattaataatgagcatgtataagaggcttctggcaaatttggggtaggagaaacacttgagaacagagagatgagtgattaagacagataaagtcctagttccaaagattggcacatgatgacctgctctgatattttccagagtgtgcatgaaatatggtgttagaggctaatagacccagcattaaatcacactaaattgtagagaaaaaatatttttagcttttaagatttattttgtcctattttattttacaaattaaaaagagaaagtttccatttgggcaaacatatcgttagcagtattttagccgaagcattttgactgctgtttaaaaaaaaaatcctaaaatctcagtgaatttacacaatccaaagtcattttttattcagtgagtacgattatggggcagcctttcacacagtgactcatgatccagtttcccagactcccttgctgtgggctgtggttatgtgactgagttctatccaacggaatgagacagaagtgattgagtgcctcccacacggtgacccaaggaccacattttctgccatcctgtggctctgccatctgctagggtctcagagatttttatctggctcgtttttattcaactaacagagaaggagaagagagggaatgtgaaggcagcatggaagtttattatgaaagtccttgaagaggtactcatcacttctgtctcatttcattggctagagctcagtcacatgatcacagcccactgcaaagaattctgggaaatgcagtcatgctgcatgcccagaaagaaggctttgagtaatctcctggagatgctccataatatggcaggcactaagacttcaggcgtggagccttcccaagtagtgccattttcactagagtttaataacattgttttgttttcattctacttattttatgttttccatttttagcaattgaaactggtttttcttctatggcagaaatataaaattttcttacaaaatgaatttaaattaagaaaagcgaatctatttaagaaaaaaatgaataaataaataaaagtagaatacagaaatcacaaaatctactatggaaacacatcaatgaacacttcattatttgatctacttttgaattagtttttcagtctaattttcagagactctgcttctgcccacaacttctcacagtaagtcaacttgcaagctatcctctcattgagctctggctggccatgaatgaggagaccaattttctactaccaaaattaaaaacagtgaccttttcccaattctcaggagcaaactatttatgtaataaaccaaatattctcctacttttaatttccctttattaatttaaaaaaatgctttggcacttagctgctggatctaacatgaggcttagaatgatatcatatattgacttatttgaaattacatttaatatatctcaagttcattatattctacaacaacagcaaaaaaagagcaaggcatccaggtgagctgtgttccaaacaagttacagaattatgccacagcatttgctgatttcatccgcatgtctccctgtccctgctccccctcccaaacccgttcatgtctttctcctacctccataaggtcactcaaatatgtctacctccccttaccgtccaccaccactactgcctaccatcttgtaatcctcaatctcctcctcattcctactgttttcagacccatcctccacccctgcggcctttgtgacctctctaaaatcaaaatctcatcatgctctttcttgcttaaaacttttaaatgttgctccatttgtccacagaataaacatcacacttctgaccttgacccatctggcccatgaggacttttttctgctgacatggccagcctcacctcctctcagcttcccagcatccccaccgtgcggggccccagcccaagattctctctctacttaacaaattactcctttcctttcctgctgccaaagagctcactttcgcctgataaggccaggtgagggcttctcttatgagctcccacagcacactgtgcttatcatttttatatcagacattgtaaaccaggcttattttgagctccaagaggatgctgattatgtttttttttatttttatatccccagtgttaaattgaactacttatagtagacactcaagtatatgtaagaaggtttctgttttgttttgtttttgtctgtccagaaactctcctgacatctgtttcaagcacctcttgtttgggagaattgctcctttcccctccaactgaggtcttcagaggctcctatatgtagtctctggccaatccaagtcaagccaatcactgttcttcctggggatttttcaaactgaaattcaggaaaaagtactggtcctatgatggtaacaaagctgagaaatgtgagtgggccaagggcagagcaaggcatgcagaaaagtcatgtatcaatgcagaagacggccagcagcaaagagattatcagctcccctttgttttaggtataaaaataaaatgtctagaagtggttcaatcgcactttaaccaaatccaagctactattaagtgagaaagcaattcagtgcattaaagtaagaatatgcaaggttcaccttttgaatatttcaaactttctcatgagcttacctccccaatgagacattaaattgcttgaggcataaactgtctttatgttacacagaacttagtgtaaggctgggcacaaagtgggacttatgaaaagaatcagatggaatgaatgagtaaaggaaggcaggcatgaatgtaatgtctcaagttatattactctagaatgtttaagagctttatagccataatgcaaatgtatgctctgactcgaccaggttgacctacgagatcttgttctcaaacccgaattccatgtcccatgagatctggagctgccactccaacactggtacagtgctgccactctcttgcccacgcatttctcagcttcctgcagccatgtgcattctccaattcatcccatatcaacttgagtttcaaaacctagagtcatcacaggtttttaaaaggaacagcatcacactaagtatctcatgtttttgtttttgtttttgttttttgtagacttcattgagatttatgggaaagttcacaacacacagtacctcactcccaccctctcccagcctctctttccctctctctttttctgcccccacgccctctgcagaagacaacaacaacaacaacaaaaacctgaattattccccttgggtcatgcaaaacacacctgcccacatccaggccctctaggaccccagtcctctacttttagaagcttatcaaagttcgtcttccaaatgcatccagcagcctcccaagaaaaaataatggtcagtggcactttcttcattacactatatagttattctaaaattccaataggaagtgagaactttccaataaaatctttgaggatttacacagcccgtgtgaaaatactcatgacagaaagagcaacagaacccggcgcgcaggaactaaaaatatttttaacattaattgcaattaaagcagaactctaagagatgacaagttacctaacacacattcatctgtgtgaaaagaaacctttcaacacatagaagctccctgatatgctgcctcaaaatactcaatcagggagaaattcagctccaaagaggtattttgatagatgcttccaatcagtagacacaagaacagggtggcatgccatgttcgttttggggctgccatccatctgtaggttatcaaaacaggcccgcactgatgaagatatcctgaaccaagcggcagaaactgcaatcatactgattttcactcagaataaacaaatcagattttcccttgggagcagccaagaaagtctgtgtggccagcttgaaaataatatgttgctgtcagcccagcatccattagcagccgctttcttctggtaaaaacaaacaaacaaaaaaagcagtgctgttgtgttgttggaaaatggttatctggtgccccctggttctgacactactgaatttccaaggagagtactgaatcattgagtttcaaatttcccagttctttgtcttaaagagctatttggcccataggcccagttgggggcacaggtgagcagaagctgaggctacccaatgggacaaggcagacattggggagcagtcaattcccaagccacccatagagctacaggtaaattgctgtcctcacctggagaatgagtgcttgcctcagccttgagaagaagctgtcattacacacagaatggaactaatgaaactttctattctgagctccccaaatcttccttagcatgggaatttttctgcaggtgcagtgtctgatgcagagacactcctctccccaggtgtcaaaagaatcctttgtgcttcaagatgcagggagtgattgatgagaagcccgtgcacagaaaagaaatcactcaactctttcaacagaaattattatctgctgagtgccaaagatgacagcaggctttatgaaattatggagcatatatatataaaatgcatgtatgtgtgtatatatatgtatacagacatacatacacacagaagtattggataccttgatatgtgtaccaagcacttaaatgcattgtgtgtaagctccgtggtgcttacagtttatcaagtggatttataaaattatgaattaagacaatgcacaatatctgcctaaagaaagttccaaacatgtggttccagaggttcaggggacagaggaaaaaaacataaaggagaaaccagacacccacggcagagagaggctttcctctcttacgtcagagatggcatcaaaatgtatttcaggcccagggcattggctcatgcctgtaatcccagcagttagagaggccaaggtgggaggatcacttgaggccagaatttgagaccagcctgggcaacatagaaagatcccagtctctacaaaaaaaaaaaaaaattaaaaatcagccaggttttgtggtaggcacctgtagtcccagctacttgggaggctgaggtgggaggatcacttgagtccaggggttccaggctgcaatgagctgtgtcaacagggcaggaccttgtctctcaaaaaagaacaattgtgatctgtttaggatgttttgcccgtcttgctgtgtctttattgcaagggttccaatagcacctgaggtagtttgtagactctggttctgtctaataaattggcttcttcaggtgtctatttgcatatgttgatatcacagaatgaagaaggcctggagcaggacattttccattcagatccctgaggacagtggaggcagaggcagagagatgcagagggcaatatccccacagggacgagtgcagagagcttctctgcaggagaaagatgagggcattgtttccacggggatttttttgagggctgaggcacaagcagccacgctttgacacaaatcccgcaaaaaaaaagctctcaggaaacaaagcacaaaacccggacttcttctctcctttcttgtgaaagctgctacctcagaggagcgagcatgggaaaggagactcctgttcacaggaggctaccagcagactttggaaagaggggatagaactcctggatccatcctggaaggcgggttgtcacctagggctctttgtcagcaggaggggcacagctgaggtggagcccaggagaggctgtggctcttatcaggacctgctgggcccagaaagcagagccacaaaagatgcagggatcgccatgcaggctcctccccgcctctcccaggaaaccagacacccacggcagagggaggcttctggagctcatgctcaccctctctcacaatgcttaaatccatggtggtgcttagaatgttaggaaccaaggcaaaagccccagattcacaactggatgaatggtgctaacagaatccaaatttagttggagacagattttcacacttatttgtttcccaaagtttaattttcataaattttcattttagaatactactgttctttccatggccaccctatttgtccatcccagtttaatctggggccattgtcaacatcagccccaaaaagtacacctgaacccaccacacaccagtcactacattggccagaggaggaccagccatggcatagacctcctatcagggtgaggtggtcactcagaggagatccccggaaggcccttcctggtcagaggagatccccagatctctcctggcttctcctggcctttgattaggaactcaggacaggcagaagcccctgaactaccatcaccctcactggcagagatggtggattccacaagaatcacctctggagagctttggccatgggcttcggaactcttcatggcaccaacctgccttagcacctgttctcctaggttttcttctccatctctgccatttctggaactgtcagttacttccctggaagagacatccaagtcttaccatgggaaacctagatctgcctttttaactctgcccgactcccaggcactagaagaggggctgagggaattgggctgatggctcatcagccaccagctctcctagatgtcgttgcatccctgcagctaatgctggtggagatcacccaggagaagctcacagcctcccacaccacagcagcttctctaacgggagcagggtcctctggcttggccactcccgcagtattctcaagagagaaagcaaaaaagagaagcatcttctgctcccgttttaagtttctcttcccttctcaccatgccacaccagtgcaatggtgaataaataaagcagaatgggtgtcatcacccagaggagtcagcttcgcattgtcagagaagtcactgagcaccaagacctccttctggggagaaacagaggctgggagcggatgctgtgggaggagtcatggtgcagcatctggggcttgtggggaggaagcacagaaagcaaaggtccgagaaccccgcatcacatgcccttttcaacactcagcctctgtcagtcagtttgttctttatgcagaaagagagatcaggaggaagaataggagagttgaaaagggcaagaaggttcaggaaaatggcttggtggaaaataccaagctgttgctttgatttggagcttctttctttccacagctcatcatctgcttccaccccagggtgatttcagctgtcatccttccttctgatcctgcttccatttcagctctgggatgtctgcagccatgtctcttccagccccagtctctccatcccttcccctttccccactccgtcttcacatgagatgcacactctgagtgcccttctaaacagctgcaccttctaattctctctagagaacattagctctttggtctcctcagcaccaaccgtctcgagttgtctcagctacggagatacagagccttcctttcctcttaggagcatcactccttccctatctatgcatttaatcagaatgggagctgtcacatctttctgaggggtggcatctatcctgagctaatctaaatatgtgtacccacaatggcaggagtgcttggtccagggacggagcacaaggcagatcagtcgcaatgctgtcatgaggatttctaactgaagctgaggcatgaagtatggaaataaacaaagaccaacaaaatgagaactaggaaagcctatgtattcagagctttcaatggagccaaccaccatcattcgcattttagcatcactcagggtcagacagaggagtgggaaagcattttagtagaaacaagggaaggtttcatgtgcgccctgattgaaggctgttggcacagggaagctgtaggcctgctacctagaagagggggtcctaggcagtaggttaggggtgcatatttggatttatctgattggccttaatttggaagcagggacaaacattaggaaatctgtcaattataaatcaagtcttgaccatttggggttgattgttttagaatttattgttgagcttccccgattttcgctagagaagagccatctgactttctatatgtctgacatatcagactggcatcctggcctgtttattgtatataaatgggccagtttcctgggtgggtttgatggaggttgtgggtcaaagtttcatctttctatgtggtctggccactgtccagttgtatgtccagtgtctctgtaattaagatgatgaggacctacaggtggccaggtttttctcccttgtaagaaataatcactgtaagaatgaggccaggccaggcacagtggctcacacctgtaatcctagcactttgggaggccgaggtgggtggatcacctgaggtcaggaatttgagaccagcatgaccaacatggcaaaaccccgtctctactaaaaatacaaaaatttgttaggtgtggtggtgcacgcttgtaatcctagctacttgggaggctgaggaattgcttgaatccaggcagtagaggttgcagtgagccgagatcatgccactgcaatccagcctgcatgacaggagcgagactccatctcaaaaaatcagaatgaggccaataagcagagagaagtgagaatgaaagagaatgaaaggccaacaatagcctgggtgctgtttgagctcctggtcctagccattctaaggatagctgcatttctggcattctttgtggatttctgagtcaatccttcctttgatgttaagagccaatagttaccatttatgactgctaatttgagttatgtggcaccaggggagtcctgccctgcctcctcactggtggcttccccgccactggcccagtgttccttcccattcctcgcctgccatgatccctgacatctaatgctggtcatcagaagcctgtatgaatccacaccttggcagctttccttcttccctccttcagaccctccagcttccactgccccttttgggatcctctgatcaaccctgtaaatctcctgcagcctgactttttgttccacttccctgcatgctttcccctcaggggttgtccactcacggggcctcagttatcacttctaagtggcttccaggttcctgggcccagcactgattctctcctacctgggccccagcattaccgacccagtttcccatcttcccagcagcctcaccaggtctcgcaaggaactcggcaccttccacagcaaatgctgtagggtttctgttgggaagcaggctatagctctgacactgctgagccgcaaatgtgaagtcctgtctgggcttcttcccatttcctcttatgtctcatccatagacacagcagaaattgtcatcttcacaggaaacagagacttcaagggctttcccaaagtcagaagactcatgagcagcagagccagcacatctagaagctgcgctatggcattttccaagccacgcttccttggaaccctctggaaccacagcacagctctcaaggagacaggctgctgtaggggcttaggatacatgtccagctgccccagtgacagcctcactgcccaagctggagggctgaggctgaaaaatcttataaatgccatggactgagtcttgtcttggttttatccacacattctccccaagaatttccccacaaataaatttatgtaaccagatcatctctacaaggtatgtccctgttcaaccccaatgtagagaatctgagtcttaaagagtcaaaaggaacccagaggctacctcatagagacctgtgcacagcacacactgccccattcctcagcgcaggcaaatagccctcaagactcagctcaaacagctctgtgctgggaagccaccagaacagccttcaaattcatgagtgactttggtggaaagacttcctgatgctaaggtgaattggggcacagcttccgcccactgtgaattctccatccgaagccacatggcagccttccagaagcaccaagccttcctcagccagtccccactatgcctcttttctcaggctcagcatcctcagtcctccaggtgacctgatttccaggcactttccccctggccttttcccacctagactgccagtcacctgtttaacagatgcctccctaa
